United States Patent Application Publication US 2006/0134663 A1 - sequence listing, part 8

SEQ ID NO: 22664 - DNA, 1071650 bp, Homo Sapiens
aagcttttcatttctcctaggtcttaagttccttagcttgatgttttaaatgtgtgtggggcagggggtataggcagaaaaatttaattggttcataccgttgttttttaaaacagacataaatatggccaggtgtggtggctcacgcctgtaatcccagcactttgggaggccaaggcaggtggatcacctgaggtcaggagttcaggaccagcctggccaacatggtgaaaccctgtttctactaacaatacaaaaaattagctggggctggaagcggtggctcacgcctgtaatcccagcactttgggaggccgaggtgggcggatcacgaggtcaggagatcgagaccatcctggctaacacggtgaaaacccgtctctactaaaaaatacaaaaaaaattagccgggcatggtggcaggcgcctgtagtcccagctactctggaggctgaggcaggagaatggcgggaacccaggaggcagagcttgcagtgagctgaaatcgcaccactgcactctagcctgggagacagagagagactccgtctcaaaaaaaaaaaaaaaaaaaattagctgggcacggtgatgggcgcctgtaatcccagctacttgggaggctgaggcaggagaatcgcttgaacccgggaggcagaggttgcagtgagctgagattgtgccacagcactccagcctgggcaacagagcaagactccgtctcaaaaaaaaacaaaaaacactacctctctattcccactgcttgactagccaggcttaacagggaaaaaaaagcattagcacatggccacctttctcctgatgggaagaatcttccaccattctgcttggcaaagttctgaagctggactatagaggggagaccaagaactcaccttcttctgcagttttgccccccagtgtgaggaattctaatacctgttgcttcattggtttctacagataatttagctaactagctagctaggcagggagcaatctaatccaccttggtactcttcttcttctcacaggttgagtctccttctcagatggatgttgaattggtgagtgggtctcctgtggcactctcaccccagcctcgatgtgtgaggtctggttgtgagaaccctcccattgtgagtaaggactgggacaatgaatactgcagcaatgagtgtgtggtgaagcactgcaggtgagcttacagttctcccttttataattcagctactggtcaattctactgggaaacataggaatcttgagcataaaatcagcatctcagtgtcaccttaccttaggtagagtaggttgctgtatctggtctactagaaaagctcccctgcttaagagcttacatttgccacataagccaaagatgatgtaatcagcagttcacatttttcagttaccacatacctctcttatgtatgctctttaaaaatataataccttaagctgttagtgtttgcaaatattagcttttcaattcttggtgcaaatcagactacttagggaactagaatttggggagaaatggtaagtggaaagtaacacataataatttgcaatttgtgaaggaaatggggagatggttggaatattttacccctctccccaaattttcctgggaatttcctatagctgtaggacaaggcatttctatttcctatttcaaaaactctgcagtaaattagcattgcctctacttctgacttttaagcccactgttcttatattttcaaggtgatactatctcaccataatgctgtaggaaattatctgggaacctatttgtttaagacagataaaaaatccagctgggccatacagtgaaccccatctctactaaaaatacaaaaattagccgggcatggtggcaggcacctgtagtcctggctactcaggaggctgaagcaggagaatctcttgaacctgggaggtggaggttgcagtgagccaagaagatcacgccactgcactccagcctgggcaacagcgagactccatctcaaaaaaaaaaaaaaaaagataaaaagaatgtagcggccgggcgcggtggctcacgcttgtaatcccagcactttgggaggccaaagcgggcgattcacggggtcaggagatcaagaccatcctggctaacacagtgaaaccctgtccccactaaaaatacaaaaaattggccgggcatggtggtgggcacctgtagtcccagctactcgggaggctaaggcaggagaatggcgtgaacccatgaggtccgtctcaaaaaaaaaaatgtatctaggctgtaattctatttcagtttgtgtataattctgtttgtgtatgtctttttctctcttagggatgtattcttggcctgggtagcctctagaaattcaaacacagtggtgtttgtgaaatagtccttcctgttctccaagccagtgaagagttatctgctgggaaagtgtccaagagcctgtttttgaaacacaagctgggcttctggtagtgcctcatcacaacccatgatggctgttcatgtttcaccccttttcttccttcagcagaggccaggctatggagcagggccactgaatttgctgtaatctggagatgctttttactttcaaccataagcggtaatagcagaggaaagggtgaagggagtctgggcaagcaaagcatagagatggtggggtggtggtggggttgaagaaacttgttggtataattgtcataggacttgcctaaaatattattaaaattacgggagtgtactcagctttgagcctaggagaaaatgccactgtgtgcatccattttaaagggttccctcataaaaaaatgttattccccattatcacatcagtacactgctttgaaaacaaaacttttcaacatgggcatactgggctacatggaaaatgacatcacccaggagtgatttctctttatatatattatttctgcagttaccatccttatctgagttatcacagttcatgaatctaagaggcggaactctacatcattagtaagaggttccaccaaagtctaaagttgtattcacttgtgtttgatgaactatctttaaaagaccataggtctatcattatttcttagacataatctaaagaaaaacagactagagaagccacctggttgtaacagaataagcagaagtttacagcatgatagtccaagtggtgataactttaaataaaactcaaatttttactgtttgtagacaggaatgctgtcctagagaacctcctcctcaaccagctacgtacatagttttatcctatgcattcctgttttctgtgttttttgttttttttttttgagacagagtctcgctctgtcacccaggctggagtgcagtggtgcgacctcagctcactgaaacctctgcctcccgggttcaagcgattctcctgcatcagcctcccgagtagctaggattacaggcgcccgccactacgcccagctaatttgtggtatttttagtagagacagggtttcaccatgttggccaggctggtctcgaactcctgacctcatgatccgcccgccttgacctcccaaagtgctgggattacaggcatgagccaccgcacccagcctgcattcctgtttttttaatggttttggagggtagcagtagagatggggtctcactatgttgcccagtctagtcttgaactcctgggctacagttaccctcctacctcggcttcccaaagtgctcggattacaggtgtgagccactgtgcctagcctataatgatcattttaatgtttcccatgcactcatttagtttgaaccttcacagcaacccaatgaggtaatactcccatttcacatataatactgagagatgagttgcacaagattatacactgttaagtagcagagccagaatggacttcagaatcccaactacaatacaaatgtttatttaaataaagaagaaagctattgtacaaatatcactcttcaggtttagcttacagagccatggctatggattcttagctctgtaaggaagtgcttctataaattcttaggtttagagatgataccatctgggtacctttgcttgaaccgtgcaaccacatctgggtctagtaggtggatcccatccagttggtttccaagggtgatcctgaaacagtgtaaaaggaggggcaaaccagaaatcctggaattagagggtttaatattgttaaaaaatgcataccaaatgaagactgcctatcatcatatcaaatatgccaattctaaaaagagcttaacattagaatagtatatggtagaattactagttcagaattggcatagattctggtgttaaaatagactggatctgtattatctgagggttagtaactaatgcttagccaggcctgcttcacagagttgctaccagggagtattctttggataagcaaaatgctagcagcatgtgttttaagctctgttaaggggtgaaagatgtaattattgacagattaaatagataacttcgtaaccaccagggggcagattcaatacatcacagaatggctgaggaagatccttgggttgtgaagagagtagaaaccctagggagcagtgcttttgggtcctagaacctgttgagtttctaatgaatatttgtagaatctcataaaacagtttaaatacaagcttaagtggcttatgaatcctgtgaagctcatttatggactagtgtaaaacaatgtgaagctctactaagttctgtccttaatcataaataatagccccttgaggactagcctgttctctggtcaccttaccagttgggttgcacattgtgtggtcgtccaaataactcaatcttgcgagtgccaggagatagtctttcaatcatgccatagatttcatctggtttatgactggtggaacgaacctaggaaataaaaactagctgctttttaagttacacaagattgcaattctagccctttctattatgtttatgatctaaatgagaaaaatctgggatgagaatacacccaacatgaataactgataccaacaaaaatgtggaagctttggaggcctgggaagcacatacctcagctacgatcacatcacaatccagaccctggttgaagccttggggatttcctttgacaccaacctgctcaccacagataacagattaccttatgaaaccacacctttgaactttttctcagtaagaaatcaaatgattcttctttgtgctccacctattgaattgggccccactgctgctcaccaagcagtgttccttcccatggttcaaccagtgacctgtacggcctgtccgaatgatgcgttgcagttgatttgtcttcacccaaataatttcatctacccgttcatacctgtggggcataaaaaagaactagaattttagccaaacttttacagtttaggggtagtaccatttatagaagcaaggaatcacagaatagtctgggagaagagaacatgtatctcactgtaacagtattaccctcaaaagaaagcaacacaaccactacttacccccagagatttagacattctctccccaactccatggccctagaaagaaatgagttaaacaactatttgtatgcccatattttttttcccttcaaaatatgtgatgtgttaaaaacactataaacactttttcagtagacgctcagtgaacatttacatgcacaccaccaaaagcatggtggatctaagaacgaaaagataaaactatgctcaacaaccttacctttctcaaagaacaaatgtagagttaaatatatattcggggtaaaatttgcattgtaaacaggcattaggactcagtagaaaaaaagactggctgggcatggtagctcacgcctgtaatcccagcactttaggagctcgaggtgagtggatcacaaggtcaggagatagagaccatcctggctaacatggtgaaatccagtctctactaaaaatacaaaaagaaaaaattagctgggctggtggcacgtgcctgtaatcccagctactcaggaggctgaggcaggagaattgcttgaacctgggaggtggaggttgcagtgagctgagatcacactactgcactccagcctaagcaacacagtgagactctctcaaaaaaagaaaaaaagactaaatcagtcatacatttaatagtggggctaggaaaacccaggattttatctcccattcagtattcactcttgtactgtatctgtccatacctacataactgaattgcattacctgcctgtgacccagaggaagagaaagccatcatcctgtagtacgggtatgttgagcctgcgcatctcatcatctgtcagggtcccatagggcagttccatgtgaatatcccagggtgggtcagccatcacaactgcaaacttgcccaagatactgacgtccaggtagcggatatcacaacagatccactgcataaagtggtatttggtcatcttccctactttaactctgagattcatggcccgagtccctcttttccatttgatttttcctattcccttaaaagcttatctatccccctccattcccaataagcaagacaagattgctgaattatgctctgctttcttaacgtgtatggctgccctatcaaacataagtccgtaagttgagacgagttttctgagcagacaggtacctgaggtgggaagagtcggtctgcactggaatcacctccgacactctgtgtaagagcaagctcctggcttggcgtgtggtctttgctgccaggggcctcagaatccatgcaagcatcaatttcatagtgaacatacttgcaggtatccatgtggaaacatgtattaaggaaagagcagtcacctaaagactcatcagtgtgtttattgataattcgtctgggaaaataaaaagggagaatcaagatggtgctccagatgtagatccaacagttcaaattccaaatgatttcaaaatgtctattttattaccctcccctaattctatcattagagcttccttcaagagttttaagggaggcaggtagcatggaaatccataattcatactacagaacaattgtaattcctctctgagtaaagacttggtttcctgttttaccactggaaggcaagcagtgcaggagacttgggtagaacagaataaaacactgacctaagagtttaggttccttttctcctaagattatcctcctttcagagtactttaactttcactgtggctcagagacagacatactttgctattctaagagggagggagcttttaaaaaaaaaaactcagttatttgggagtacagcctgtattcttcccacacaatgcacttctgaaagtacaccttcagggtctggaggacttacacaaaccataaactaaataagattacagacagaaccccaatgactggaaggaatatgctgaaaaggaatggctgcttctgacaaacccatcccacctcattcccttccaagagacctgaagtgcagcttgcgacagggtcgatcagcatcactggctttcatgcactcctccttggttccatagtcacagaattcttgcacttgggcccgacctcgagagcgaaatttttcaacaatggattgttccttggctgttgtagtatttaatagctctaggatctcctgactgacctgtgacagaagtagccttggacttaaaatgtcttatagatcaaactggctcttagaccaactccgcaaattctttttgacattaatgtcttctaagagataaatcaacttttttttttttttttttttaagagatgggatcttgctgtcacccaggccagagtgtagttgtgtaatcataactcactgtttctcccactgaactcccaggctcaagtgatcctcccagctcagccttcaattgtagctgggaatataggtgcgtgacaccatgccagctaatgttttaattactttactttctatagggatagggtctatgttgcccaggccagtcttgaactcctcgcctcaggtgatcctcacgccttggcctcccaaagtgttgagattacaggaatgagccattgtgcctagacctaaattagctaacttaatattggaaaattggagccttcagataagagatttgttaggggttcagtccttcctcacaaatatgcatttgggatgaaattaaaatggaagaggcctggttcctaccgctaagcattatgttaacatcccctccccaggaaggcattccttctacaaaaaacatatttactgggtgctgaactaaaaagtatagtgctaaacactttactttttagctcagagtctattcaattctataaggcaggatacgctggtattatcttcatgttacagatgagaagactaaggctcaagagaagttaattaacttgttcaaactcacgcactagaagtaccaaacagataagaactcatgtcaggccaatacttatactcagaaccaattcacattatttagtcaatttccataattggtctagtattcctctccattcatctccctatatttctatatatttggattcctcttctcttgatccaattctttcagattcagtgacagattatctaaataagaatttgtcgacattggcattgttgacactttgggacagacaactgtttgttgtgggggtttgtcccactatgcactgtaggatgtttgacaacatccctggcctctacccccactagatgccaatagcactcccccatgtgtgtgacaataaaaatgtctccggacattaccagatcccctgggagttgggcagtagggaatcatccccagttgagaaccactgctgtaaacagttccttgccctaggggtaaatccctgtcaaacaaagctataattaagagcatattgtgagagtattttcacatgacccctaccttcttgctctgttgttccttagtggactgttggttcagaaggctctctatctccagatcaacatctgaggcagcatgtttccttgatttcttggctggctcctttgctggttccgatgctgaagagttcagaccagagactaacgaactggcaaaggcagctactgtagtcgagtcctgttctgcacgccgcttctgccctgtgacagtccctgctacctccccagggcccttcttttctgccacagcacccatcatggcagagagcttggaatggtcagcataggttacaagagtaggatgtgcatcatcttgtaggagacctcgctttacctcaatcaactcctgagctgcaaacttctgcaggaggctttctaccccatcttgagtggcaggagcatctggctagagaacgaggggaggtatgggcaataagacactgaccgtgaactgaaaataagtggtaaatcctaactctgtcaggtcattaccgtggagatggcaagacagatggacacagcatcagtgggcaatgttaaggccagatcagagaggtggtgtagcaacttcttctctaactcaggatctgtagctaattcaggaactgctgaagctgtgctgggcttagggccaccagaggtgggtgcagtaggcactgggctgtcactacggaaggttggagacaatgctgcctctggattccgtagatctaagaatgaagagaagtgaaaatgaaaaaaggcaaccactgttggtctatatatttctgagaagtcaaattctctagcattcccatacacagatctttcattttgtgcaggaaattctgtgaccaactttagcactagattacctatcctcaatcatactaaaacattcactgctttgtcaagataatactggattttctatctaccttttctctattgagtgagtaatcttttcctaattccctatccttgctgtgatacaaagaaagtaaattagcatgatagatttaaatatccctaccacctttctatcaacctacattttaataaaggacaggaatatactcaacaacctaggctgggatccaatattctttttgaggcatgtagtgtgaattttaatgaattcaggccactgatcaacaaagtgtacaaaatgacaatgttgggggccaacagtgttacctataacactcacaaacacaaaaatcttaatactttgctgaagccttggttaccaaatgatatttcctgactatattattatcatctattacttcacaagctgggttgccatcataaccttaataacgatttgagaaactaaaattaggacaaaatgttatctttgagaaagcctaatatctgtggttaattaaaatatagatgaaatattaaactcctaagaactgaactgaaattgctaaataagtaggccattagtttacatttagaaatattttgtttacttaaatatttccattctggtaaggcactggggctcacgcctgtaatcccagcactctgggaggccaaggtgggtggatcacttgaggtgaggagttcgagaccagcctggccaacatggtgaaaccccatctctactaaaatacaaaaaaaaaaaaaatttagctgggggtggtgatgcaaggttataatcccagctactggggaggctgaaggaggagaattgcttgaacccacgaggcagaggctgcagtgagccaacatcatgccactgcactccagactgggcgacagagcaagactctgtctcaaaaaatatataaataaataattcattaatttgaaaattttccactctaatggaaactgaatttattaaaatctgactcagggcttggtgtggtgccttatctctgtaatcccagcactgtgagaggccaaggtgggaggatcacttgagcccaggagttccagaccagccaggggaacatggtgaacccagtgtctctaaagaaaatttttttaaaaattagccacacaaggtggcctgtgcctgtagtcccagctgctggggaggctgaggtgggaggattccactctcacccatttcttctttcattttcagtttctccagttagtaactgaagatgttctttgagtaattaagtgagtgagaaaatttttaagtgagaaatctataaaaagaaccatgttaacataaatatttcagtccttacaagttggtattgacttttctcattggtaatctgactgatttaatactgctcattccaatatctggtgatgtaattctggttatgaatccttgtattaataacacctcctgggaggttttttttccccaacattacattcagaatattagagctgaaaataccttttttaaggttatcaggaggagggagcttatgtttaatgtggtggataaaacttaactgctggttaatacaattgttattcaggtgaaattccctaaacttttcacgtgcaaagttttgtatgtatacagacatttggggaaaagttttatcatccctaaaaccggttactgtccagaaaatgataagaatccctgggttccaaatccttcataaggtatttattcatttatttattcaacacatttactcaatgcctccgctctgctgcaactacactgacattctgcttctaatctaacgaaaataatgtgttcggtttagcaaaataatacataacacttgattcaccctttaattaagagaaccactgaaattaatatggtctgattacaaatttgctgaatccttaaacgtgtcaacatctatatgcacatcttcaatctcaagaaatatactggagcacttcacatatttactatgtgctaaacctggccaaatatagtttgtttccattaaaataaagtttttttttttgagacggagtcttgctctgttgccaaggccaaaataaagatttttttaagtaatatttttctttttaaaaaaatatactttaccaacatgagatatataacacccattaggatggcgcttcctcaaaaatcaaaaatagaattaccatatgatctagcaattccacttttgggtatatgcccaaaagcattaaagcggggtctcggtcgggcgtggttggctcacacctgtaatcctagcactttgggaggcagaggcgggcagatcacgaggtcaggagatcgagaccatcctggctaacacggtgaaaccccgtctctactaaaaatacaaaaaaattagccggacgtggtggcaggcacctgtagtcccagctactcaggaggctaaggcaggagaatggggtgaacccaggaggtggagcttgcagtgagccgagatcgcgctactgcactccagcctgggtgacagagcgagactccgtctcaagaaaaaacaaaacaaaaaagaattaaagcagggtctcaaagagatattcatacacccaggttcatagcagcattatttacaatagccaaaaggtagaagtaacccaaacgcccacccatggatgaatgaacaaaatgtgttatatacatacagtggaatattatttatccttcaaaaggaaggaggccaggcatggaggcttatgcctgtaatcccagcactttgggaggctgaggatggaggatcacttgagctcaggagtccaagaccaacctaagcaacatggcaaaaccctgttgggcgttttgcccaaaaaatactaaaaattagccaggcaaggttgtatgtgcctgtagtacatacaacaagcacctgccaccacacctggctaatttttatatttttagtagagacagagtttcaccatgttggccaggctggtcttgaactcctgacctcaggtgatccacccgccttagccttccaaaggctgtggacacctgtagtcacaactactcgggaggctgaggcaggagaattgcttgaacccaggaggcagaggttgcagtgaggtgagatggcaccactgcactccagcctgggcaacaagagcgaaactctgtctcaaaaaataaataaataaataaataaataataaaaatgccaatctaacaaaggtctcccaatattttgcccatattattttccactattaacgatgtggtgggtacattttagttcattttatatccttgtcttttgacactcagttcagtagtcggtaattatcagatttcagtaatgctgtaaaaaacaaggtgtggccgggcgcggtggctcacacctgtaatcccagcaatttgagaggccgagatgggcggatcacgaggtcaggagatcgagaccatcctggctaacactgtgaaaccccgtctctactaaaaacgatacaaaaaaatcagccaggcatggtggtgggcacctttagtcccagctacttgggaggctgaggcaggagaatggcgtgaacctggcagtcggagcttgcagtgagccgagatcgcgccactgcattccagcctgggcaacagatgtggtaggcaaatttttatttccggtgagaaacgaatggaataatctgaacttttatcaagtcttgagttatatcttacatgacaacatgattcataaacttacaatacagtgtttcacaagggtttcctaagaatcctaaagctcaacaaaatacattctttgaaataatcaaaataacacagaaagaacagtgacattctggtttaatttgtatgtttcatctttacctattaccacagtaccaaatgatgggtcagatcaagctctcggtcagaagacaagatacatttaattacaaccccaaaaatacttttataagagtcttaactagactgggattacatctgtaatcccagcactttgggaggccagggtgggaggatagcttgagcccaagagtccaagaccagcctgggcaacatggcaaggccctgtttctacaaagaaataaaaattaaaaagtaggcaggcatggtagggtacacctgtggtgctagccactcaggaggaggctgaggcaggaggatcacttgagccctgaggtcgagactgcagtaagctgtgttcacgccactgaattccagcctgggtaacagaacgagattcttgtcttacacacacacacacacagaaaagggtcttagctatattactagctaaatatacaaatcaagagatattcatatctaaaaaagaaaaaataaataaaaataaaaaaggatatgtacatgcagggagaatacagtcttattgtcaaaaatattaaacatgtttagcaaggacctggatcaaagtatcaaggctctagtagttaggtctgcatacagcagaaagtttggttaataccaaaatgtagttaatgtcatagaaaaatgaaatgaaacttaaaatgaccaagagcaattagaatcattcattgaaagagtatgaatttagaaatggaaaagtataaagaagtatgatgccgggcacagtggctcacacctgtaatcccagcactttgggaaactgaggcgggcagatcagcagaggttgggagtttgagaccagcctgaccaacatggagaaaccccgtctctactaaaaatacaaaattagccaggagtggtggcacatgcctgtaatcccagctactcaggaagctgaggcaggagaatcacttgaacctgggaggcggaggttgcggtgagccaagatcgcgccattgcactctagcctgggcaacaagagcgaaactccatctcaaaaataaataaataagtatgatgaggaacaattaaaaccaagaaacaacaaacaccaccacagatagaggatggcctgtcacaaaaacgacagaaaggtgaacacaaagtagtcaatgatgtagtacaccaatatagcggctttttaaaagttaattttgtaggccaggcatggtggctcacgcctgtaatcccagcactttgggaggccaacgtgagtggattgcttgagctcaggagttagagatcagcctgggcaacatggtgaaaccccttctctaccaaaaatacaaaaaatagctgggcatggtagcacacgcctgtggccccagctacttgagaggctgaagtgggaggatcgctggagcccgggaagtcaaggcagcagtgagccatgatcatgccacagcactccagcctgggtgacagagggagaccctgtctctaactaactaactaaataattttgcagatcactttgttgaaacaaacaactacctgatcctcaggtccccttttgcaactgccattgctgaatgggaaaagactccacaggaaaattaaataggctggatatggtggctctcacctgtaattcaaacactttgggaggcttaggcaagaggacagcttgagcccaggtgttcaagacaaatttgggcaacataatgagaccatatctctattaaaaagttaaaaattagccaggcatggtggcatgcacctgtagtcctagctactcaggaggatgagccgggaggactgctacactccagcctgggcaacggtgagagacgctatctcaaaaacaaaagcaaaaaaagtcgttggcatcatttatgcacatttttaaaaagtttcaaaacaggaaaccaaagaataggggaaaaaacataacaaaacaaaaaattgtatctataaataaatcaatgaagtttctagagcaagggaaaaaaaattctccctcttaggtaattcaggaactactctgagacttgactactaattattgcctgaccatatgacttgcacttcttactccactatcctcccctcttacctctttaattatctaggtcctatatagccataaaggccaaattcaagtgccaattccactatgatggttttgatggcttcactacctacaccagctcttgttacttctcttcattgtacagactgtagattcattcatttggtttcgtacatatatcttatcatattcctcactttttgtaagcgtctccccttgaatcctatgctttttaaacttcttgaggacaggggcaatttcttccttatttttgtctaattagacccatgaacactgtagatactcaagaaaggtaattaattaggtgggaggatcctgccagtgcatcttctatttctaggggccagaatacgagcacatgaacctaacatgatctagacaagatttagagatgcagttgaagatactgacaaatattggaacaatctaccacaaaggtgatactgagtcactatttttgcagagctttgttactagtttgccttaaataattcagagtttgtcctgagggtagggagtggataacagtgaatttaatcttttaaatttccttcaagttttatgatcgtgacacgggggcaacaggagaagagaaaaagtttggaaaccaaacacaaatgttttcagattcctgctaggtatgtaaatggctaagtcaatgccggtaggggtactcattcagaaacacccagtgccactctgtacgggccactaaattgggcactgcggatataaaggttcattcctcgcttactgtacccacagctgccaagaaatgaccactacaaaagagtcgttataactgagggaacaaagcgccaaagcagcaacaaaaaggggttcttgctgcttcgcgggatagggggctgagcagcctcacaaaggcgacgtcctcgcagtctgaagaggagtgggcaaggcggacgagggtggggctcaagcgtccgtccggtaaaagtgagctggaagaaccgaggcccagcgtgaggaggaaccgcgaactacttgcagaagggcgaacgtctgctgctgaaggtggagagggagtaccaatgtacgaggctttatagaaatggccgtttggtaaagggcagtgactctggagctttttctctagggatcccgcccgtcctccccggttgagcctcggccccaacagcccagtgcctcacccaagtgccccgagtcctgcttccgcctccgctgcagcctctcccgcagagagtccagctgcttcttgtgggcctggatagagctccacgtgtccgacatcctagtctcccagccctgacacctctcgaataaggcgcggcggactagcacctcccagcactcgctccaggatatagccaattctcacgcggacaccccgaaggctaaccggaaaatgacccctggagctgagcaagacagaaaagtcatttccggtgtcgcgctttcttggaagctataaagagccacgttaggtgttggcagagcggccggtatagtcctcatacccgctctctcatgcttccggacacagtgaggctgtggttgccatgttggtgactggcagagcggccatgttgcttatagacgcgcatgcggccatgttgaatattcggagaggagtcctgagagttgacttgtgttaaagtagcactcgtagagagcaacaccatatagtacagttttgggggtttttttcttttttttttttttgagacggagtttcactctgtcgccctggctggagtgcaatggcgcgatctcggctcacagcaacctccacctcccgggttcaagtgattatcctgccgcagcctcccgagtagctggtattacaggcgcccgccaccacgcccggcagattttttgtatttttagtagagacggggtttcactgtgttggccaggccagtctcgaactcctcacctcgtgatccgccctccttggcctcccaaagtgctaggattacaggcgtgagccaccacacccggccatagtacagatttttaagatgaaggatcactagttccttttgacagtttggtactaacataccttttccactgaaggtggtgttggtttgtttccatgcgttcatttacaaaaaaataaaaaaataaaaaacacaacggtggtccccaatctgaggtgaggagggggcggtggtgggtgcgggcatgcttctttgtgttgacgaggcgtggggaagtggggagggctgatgaaggaaaaatccgagaggtcttcaaatacgtgatctctctcttaggctaaatttacaaagtacgtgtaatctattaaaatcgggttccgacactaagagggctttgaggtcctggttgcgttgtgttttttgttatgagagctacctgcatgagtgtgttcagtttgtgaaatgtaattgagctgaacattttggtgtgcacttttctgtatgtgtagtaaacttaaatacaaggttggtggtggtggtttttcctacaatcctttctttctttctttttttgacacattttcttttttttttttttttgagatggagtctcactcactctgtcacccaggctggagtgcaatggcgtggtctcagctcactgcaacctccgcctcctgggttcaagcgattctcctgcctcagcctcccgaatagctgggattacaggcgcgtgccaccacacctggctaattttttttatttttagtagagacagggtttcactatgttggccaggctggtctcgaactcctgacctcgtgatctgcccctacgatctgcccccctgcctcagcctcccaaagtgctgggattacaggcgtgagccaccgagcctggcctgacacagagtttcattcttactgcccaggctggtgtgcagtggtgtgatctcagctcactgcaacctccacctcccggattctagctgcctcagcctacctagtagcaggtattacagggacctgccaccatgcccagttaattttgtatttttaatagagatggggtttcaccatgttggccaggctggtcttgaactcctgaccttagctcatcagcctgccttggctttccaacgtgctggggttacaggcatgagccaccggcttggccttttgtttgtttgtttgttttgttttttttaatggagctccctgaatggaaacatttcgggaatcactgacttatccaatgtctacatgatgccatacgctgttgtccaaaaaatacaaaaaatagtttgattggcatggctcctgttttcaaagagtttataatctggtcaaggagctgtgagccagtttattaatactgaaccatcttcacagcatgaggtagcatgggcatagactttttaaaaaacaaaaacaaaacaaaacaaaaaaacaggaaaaaaaaaacgtgatttcaaagaagaggaggactccaagtttaatgacccaggaaggcattggaaagaagctggaatcaaggttcaggcttaaagtgaccactaaggtttcagtaggtgaaggtataggagggaaatccaggtctggaatatgataaaggcaaaggtctagactagaggtaggaaagcgtgatgtgtgttatgccaatctggattagttcgccagaacataaagatttatatttgggaatattgggagaaattttaggtttccaaatttgaggccagattgtagaaggtacatggtacctgagtaaagacttggcaatttattcagaatacaataggaaacacttagggtttgtaaataggaatgtttcaaaattgatttgctgttctagataaattgaggtgaggaggaaggagattttggagaggacaaagatggttattagtccattgtaactaagtgtctgatgagaagaactgtaactaaaagctggttatgaacagtaatgaaaaggaaggtgtgaatatgaagggagctattgaaagatgtatgtgtattgtaatatgacttttatccattcagtaagtattgagtgtttactatgtgttagatactatggagatttagtagtgatgaaaatactcatttccatctcattttctgaacttaatttacttttagggaatttacactatctattgggatgtgtaactttgtttttttgtttttgttttattgagacaagcctcactctttcactgctggagggcagtggtgcaaagaagtagcacaagtactcctgaaagtcaatcaaatcaagggcagctcccagaagtttttgctttcacattaactctgggtaaattattacagtggcatattgggcaaattttagaagtacaggaaggcctcttagcatgatcttcttgtagagagattctttttagactcctcttgaccagtttgctgctcaaaagaaagacattgctttcttgtccgcgcgtagccctcagcagtacacagaggagaaggaggaggaggaggaggagggaaaaatgcagaattcttctagtcaaaatggagtgtaagcctaattttgagcagatgggtgctgcatgcattacacttctcaacttttcctcatatctgccatggtagattgcttccagtgttggccacaacaatgcctctcacctacatgcccttaggcagtgtgactttgccccctttcaatcaataagtaaagcttattccccctcctcttgaatctgagctaggcttctgactagctttcaccaaaagaatgtggcagaagagatattccctgagttctagaccttaagaggtctagaccttaaaaggaattacagctttcgggatttggttttgttttgtttctaatttttgagagagagtccctgggtctgttccatctaaacactgttgaagcaagagacagatctgagggacctccaaatgtgctgccgcggcttctgtttctgccctcttggaaccctgggccttcatggaagtccagtcaccctgatagaccacttaaaaagagagaccctgggggatgaaggatggtaaggagagagggttcagcattccagccagccatctgagtagccagaagttgaggccatcttggcttctccagtccagatgaaagctgcatgagtgagcccagtcctcaccacatggaacatagacaagccatcctaccaggcactccatggaatcataagcaaatacgtaagtattaagacactaggctgggtgcggtggctcacacatgtaatcccagcactttgggaggccaaggtgggcggatcatgaagtcaggagttcgaggccagcctggccaacatagtgaaaccccatctgtactaaaaatacaaaaattagccaggtgcggtggcatgtgcctgtagtttcagctacttgagaggttgaggcaggagaatcgcttgaacccaggaggcagaggttgtggtgagctgagacagtgccattgcactccagcccgggtgacagagcaagactctgtctcaaaaaaaaaaaaagaagacattaattggctgtgtgctgtggtatgtgcctgtaatcccagctgctttggaggctgaggtgggaggatcccttgaactcaggagttcaagaccatcctaggcaacataccgagaccccatctcaaacatagcactaactgtatacttcacttttttttttttttttttttttttgagatggagccttgctctgttacccaggctggagtacagtggcacgatctcagctcaccacaactccccctcccgggtacaagcaattctcctgcctcagcctcccgagaagctgggactacaggcatgtaccaccatgtccggctaattgtatttttagtagagacaggatttcactgtgttggccaggctggtctcaaactcctgacctcgtgatccacccgccttggcctcccaaagtgctgggattacaggcgtgagccatcgtgcccaacccttcgctttttacttgattctttggctgaatgttttttccctcaagtcttgttcatatctgactaaaaacagaatgcccactagggttagtcaacctactgttattaaatgttagaaaaggaaatataaagggaagtcaaagttgggtctaattgagaataagactagtgaaatctgttttaaggatcagaagacaagtgtttgttgattgactaagaagttccagggatgataaccaaagttacaggtgcaggagtttctgagagatgagaatgtgccaataaattctgcgccttattcaggggtgacacaggttgaattccctgagaagcagatgctgggacagaactggtataaggaaagacagtggaggaaatggggagtggaattgattagggagagctgtcagaccacaatgcagacctgataaagtctctgccagtccagtgggaagttccagagcaaatattgttcattagagtcctatgttccaatggctaagcccttgtaccttgctcagttttgggccaaggattggagaagagcagtacagctggaggttgtcagctaaccaggctccttgcacttggtagccagttctttcttgaaggaacatctcaaaagcagcccatctctgtgtctgccaaacagagtgtgatggatcttatacaggtttttgttttttttttttttgagatggagtcttgctctgtctcccaggctggagtgcagtggcgcgatctcggctcactgcaacctccacctcccgtgttcaggtcattctcttgcctcagccttctgagtagctggattacaggtgcctgccaccacacttggctaatatttatttatttttgagacgaagttttgctcttgttgcccaggctgtagtgcaatggcatgatctcagctcaccgcaaccttctcctcctgggttcaagtgattctcctgcctcagccccccaagtagctgggattacaggccactgccaccacgcccagctaattttgtatttttagtagagatggggtttcaccacgttgcccaagctggtctcgaactcctgacctcaggtgatccacctgcctcggcctcccaaagtgctgggattacaggtgtgagccacggcacccggccttatataggttcttaaatggcaactgcattggttcctaagttgtataggttgagttaatatacttgagagtggttattgtgaaagctgaattcaagagaattggatgctccctttcccttctccatttttgaattacaagtttgaattccctctctgattccacaggacattgtccattatctgtcatagttcctgttacccccaaataaaagtatttgtttaaagctaggcaatatggtatgtgcctgtagtcccaggaggctgagatgggaagatcagttaagccaaggagttggagtccagcatgtacaatactgagaccctgtctcttaaaaaaaaaaaaaaaaaagtatctgtttacattttcccactgagactgagctcccctaagggcagaagtttctcttacagtcaaacatcacataatgatgatttggtcaactatggaccatgtgcacaacaatggttccataagatcataatggagctgaaaaattcctatcatctagtgacgttgtagttgccataatgttgtagcacagttacttcattttaaataaatttagtgtagtctaagcatacagtgtttataaagtttacagtagtttacagtaatgtcccagaccttcacattcacttaccatgcactcactaacccacccacagcaacttccagtcctgcaaactccattcatggaaagtgccctatataggtgtatctttttttattgtgttttgtattatttgtattattgtatttttactgtaccttttgtatgtctagatacacaaataccattgtgctacaatagcctacagtattttgtacagtaatatgctgtacaggtttgttgcctaggaacaataggctataacatataatctaggtttgtagtaggctataccatcttggtttgtgtaaatacattctatgaggtttgcacaacaacaaaattgcctaatgatacatttcttggaatgtgtcctggtcattaagcgaggcataacagtatttacctttgcatctaaccaacacttggtctcttttttaattttttttttttttgagacagagtctccctctgtcacccaggctggagtgcagtggcacgatcttggttcattgcaacctttgcctcccaggttcaagcaattcaagtgattcaggcaattctcctacctcagcctcccgagtagctgggattacaggccactaccacctggctgatttttgtatttttcgtagagatggggtttcaccatgttggccaggctggtctcgaactcctgacctcaggtgatccgcccgcctcggcctcccaaagtgctaggattataggtgtgagccaccgtgcccagcctaaaaatcattttgactgggaattgagaactcttggtctctgaaacaaagtaaaacctcaaaagtcaactgaatgagcaaagaagctgtctcttgcttcttataatagcaatgactttattcatccaatttgaactagatcctctgtttcacggaaaataagtgttttgcaagctgcatttatttacatattcattcctgcaggttagacttaattcaacttccaaaaagactgtccagcaaaaagttactgaaagtgggaagtggtggggctgagcgtagagatagggtcagttataagaaggaagaaattaaaggctctaagaagagaaacaataaattagggatgaagggagaaaagaaatagaaataaaagctatcaaataaggggaggtcaatgaaaggagaaaaagcaggacaggcgagagaaaagaatgaaaaggaggcagaaagaaaagaaagtagagctgtgaaaaagcggggtggggattcaggcttagtgctggcctgcccagggaagtatccatcaataaaagcctcactgacagctgttaccataatgggaactggcacctaaagagagggcaagtctggtttaattagttaaatggcattatctgtgtccagtgggggtgggagaggttaaggggatggaatgattggtgacccacctccttccacaggctgagagaaaaagcagatctacaaagacttgccagaaagtaaagattcccatgtgttcctatttatcagttacattttaaaggggacttgcactgctctggtgggggcaactagaattaaacattggttctctatcttaaattaagtataggtttatactgggcgtggtggctcatgactgtaatcccagcactttgagaagccgaggcagcagatcacttgagcccaggagttggagaccagcctggccaacatggtgaaaccttgtgtctacggaaaatacaaaaaattagccgggtgtggtggggcacacctatagtctcagctccctgggaggctgagatgggagaatcatctgagcctgtgaagttgaggctgcagtgagctgtgattgcaccactgtaccccagccttggtgacagagttaagactctgttcccccacaccccccaacaaggaataggtttactcacctctttcccttcttacaggcagcctcacatccagagtcttaaatgatgtagcaggaagcaagtgccatctctgatcagtgaaagtagtgcaacgactgggattctgcctacctgggttctatttttgtttgagacagggtctcactctgtcacccaggctggagtgcagtggtgctatcatagctcattgcagccttcatctcccacttcagcctcttgagtagctgggactacaggcacttgccaccatgctcagctaattattatatttttttgagacagagttttgctcttgttgcctaggctggagtgcagtggcatgatcttggctctcggcaacctctgcctcctgggttcaagcaattctcctgcctcagcctcctgaatagctgggattacaggtgtgcaccaccatgcccagctaattttttgtatttttagtggagacggggtttcatcatgttggccaggctggtctcgaactcctgacctcaggtgatccactcgcttcagcctctcaaagtgcagggattacaggcgtgagacaccgtgccccgccagctaattatttttttgcagagacagggtctcactttgttttccaggcatgtcttgaactcctgggctccagcgatcccacccgcattggccttccaaagcgctggtattataggcgtgaatcactgtggctggccctacctgggttcttaatccaactttgccactgagtgactttgggcaaatcattttaccagttccatccctttagcactaagagtcaatgatattataatcttacaaatcagtctccttggactcaggtaatcctcccacctcagactcctgattagctgggaccataggtgtgcaccaccacatccagctaatttttgtatttttggaagaggcagtgttttgccatgttgcccaggctggtctcaaactcctgggctcaagcaataggcctgtcttgacctcccaaactgttgaagttacagacgtgagccattgtgacagggaaaaaaaaatatatgttttatttgaccccacccctatgtgcttcctctgaattcctaatgataagaatcctcctttgtcttgttggtagaaattattagggttgaattacatttttttctttctgattatgacatcagatctcaaggatcataaagtttaattcaccttggttctacagattcgctgatgtcagaaggctgatctgtggtttgagaaagactgaaaagaaacagtttccaacctccaaacaaaacccacagaaaagcctggtggtggaaggttctaggtagagaaaatctagacaatgactggacacagtgggcaaatgcctaccttttggaaatacaaactccacagggaacaatttccacagagaagttacattaactgaaggttgtcttaggacaaggctgaataaagtaaatatttcaacaccatatgttcagctttggcaggagatgtaggtgggaagggaatctcaattttggggaatgcccatatcacaccccagctggctatgtaatcatgaaataaggagaaacacataaatatttggttaaaacacctttaatgatagagggaaagacactaatatctcccgtctgttcttgacattttactaggttaggaagctctggagcctacagcttgaggagaagccatcgttcaagtcagtcaatagcaaaaccctcactctctcctcctcagaactcctgttccaaatgatcctatgttaagagtaaatactacaactcattacaagacggagaggcagggaggacgccacctggagctgggactcttaagaaccagacaatgacaaagacacaagccccagcctacggataggcaaaatgggtaggggtcttgaaagaggaagataaggaaaatacaaggggccagggaataaaggagggagttatctaaaactagaagcatactagtgctaggaaatcccccatgatccctggtacacctctgcacactatgtcactattagcccaaaagaatattaacgagaatgtccacattcacaagaatttgaggccttttcccttacatcatgtccctttcttagtcacataggtaccagcaagccctatgttctagcaacattccttaactctctcatcattagttcatcaaccatgctgaccaaaaatgctccttaaagatacgaacttcacatttcccaaatatctcctgggagacctcttggcaagaaatcagcttgtttcccaactttgagaggtcatcatgaatgagaagctggagaggtcttggcacactgaccagccaaaacctttaccttaatgtgaccatcaggggatttactgggaaaattttcctatgcccttccttcatttctccctacttcctagggttgggtcaccaattactggagcatcttcagtaccggcaccttctggagcagggggaggaagaaggaatgtacagtttgctacttcttgtctatgatgggcttctcaggcactgccttgggtgcaggaggctgaaataggaggggggctgtcttctccttggcttccctggatcccattgttggaggcaccttcccagccacagttcctaggccaaacagcactggtggggccaggcttggagtggtagtggaggtggagctggaattccagggcttcatgggcaggccatttgacaggaatgccacatactggttctagaaagataggggacccatacccaccagctgagcagaaaggtcaccccagaggagtggcactgggccctccagagacagctgccagccctttttggctaggctgcaatgccaaatgtaggtgctcaggtgcacctaccaaagggaaagggagaggagagaggagggggaagaagggtcacaccagggaagctggagagggttccccttgagaaagctgcagagaatctatgttcctcaggtacaaagaatgaggagggaagaaaaattccttagggggccatccccttgtaagcacagtaatttccaagctcagggactacagaaaagccactagggacataacatgttaagaacttagagaaaaagacaaaatcagggctcataactctgggaggtccttttgtgaagctgtttctgctctgtgggacaaagagcagcaggtacagaaaaacaggctcatgggatcgtggggtcatcttttcggggaaagggggagagccctgtggaggtgatggaaggcgaacagccagggactagagaaagagcagcaatattctgagggccatggggggcaaagggctgtacctggtggtgtgccaggagcatatgcttcttgagggtagcccgctcaagaaagccctgcctgcagaaaacacaagtgaagagcggcccctccttggggtgggtcttctgatgctcctccagagctgcctgggagggaaaggcctggccacacacttcgcaggcctttctgctgctgctctctcctggctcctttctcattgcctcctgcaggctcagctcctctaccaaggtcacgctggtggcttccccttctggggtgagtgctgatgccggacttgagcttctctccggtttgcccccctcttccttgcctcctaaaacaccactgcttccctgctccattggctgaggctgatccaggctgtcaggtggtggtggtggtggcaaagaagactgttgagtagttttctcattactgtccatctccttcccagctgtggctgctgccgccactgtccccacctcctcctctgccccagatgcctcttctgaatcacctctcactgatattgccttctcacctccactctctgagcctctccctgccagggaatcttcatcagtcacatcttcctcttcttcctcatcctcctcttcctcctcctcagacaactcctcttccggtgatggctgctgggactgctgctgggggaaactccctgccccggagactgtagattgctcggagccattctcctgagcagctcctccaccttcagggagtgcagtaccaccgttggggatctggccccccaggtgcatccggacatgctgctgcagagtgacagcattggtgaacttcttctggcagatggggcaggaattctgtgcccgggcagctggactggccttgtggcccacgaaatgtgcacgcagattacccctggtggagaaggctctgccacacactttgcatttgaagggcctctcacctccatgttggccataatgaaggcgtagggcccgaggacagctaagcactcggagacagatgacacactggttaggtccagaagaggctgaggatgaaggtgcaggggcagaggtggtgggggctcctgaggcagctgaggtcaccgccacagctccttgccggtcaatcttttctaccagttgctgcagctttgatgtctcagagggtgaggcccccaagggctctagcacataggggaaggggaagctgccagtggacttgaagtggttggtaagcagtgcccagcttggtagtgaagtcaccaacttacttagttgcatgcgagttgccgtgctactttctgccactccactgatggctgagccctcactccctgggggggtgttttcatcagctttattcttgggttccactgctttcatgagcacaaacttattgaaagcagggagtcctggagccgtggctgtgcctgcactggtggagagcagagtcaggctctctgtggcactgagtgctgttgtggaggccaccagaggcttgcgctcaacccctccacctggagtggctgcctcctcctcggccttctctggtggcacggacataccataaggcaagccactgctggtaatgacatagtctaggtgctctggtactgggtgtgggttcatctgcacatgtgggtacttctcacgatgccggtggaaatgcactttgaggttgccacgggtggtaaaacggtttccacagacattgcacttatagggcctctcacccgtgtgggaacgaaggtggatctgcagggcactgtcactgccaaatactttggcacagaagcggcatttgtgccttccaccaggcttctccaagggacccatcacttctccgtagctcagctcaccacttccattctttggcttcaggagccctggggaggcagtggcctcaaggcctcgggctgccccaagacactgtgctgccagtagtcccgtggtgcttgggaatgccagatgaggcgaggcaatcagctgatctgtgctgcctggcaaggctggggaaggggcaggggtgggtttgtggcttcgcccaacccctccagcagagaaaggatgctgtgaccccagtgggtggtaaaggtggaagaaggcctgcttgggcgtttctgcccctgaagaggaagaggaggaggaggaggaagatgccagtgtcttgctggtttggacaggcttgatggggctgaagaggggtagtaggggcttggtggaagaggcagtccctgtcccaggtagctctgagggactggcaggggcacccaccgtctggcctaaggagccaagcaacagcacctgcctgcagatttgctcagtcatctgcatctgatggatctgccgctgctgcagcacccgtagctcttccaagatcagggggatattcaagtggccactgcctacccctgggggcggagggggtggtggaggaggagggggtgcaggggtcgattctggaggtaatggggttgctcccagcttgggactggccaagatcaggcccccgcctcccccagccgctgtacctgtggcagcgaccaggaaatgccctggagactcctctcctctcctctctgggccccaggtgggatccgtgggcacggaggacccagaatctggggggttgctatgctctgtgtccatgacctgaggattattgtgaccctcaggccggggttcagaggaggccgaagagttgttggggttctcctggcccccaattatcaccattacaggagggtcagtagaacatgcgttctggtgggcgaggaattcagttgggtcagtgaattgtgcgcagcacttggcacagacttgggggtgatcctcctcgctagcatcacctggggagaagacaaggagagagagcgtgggtggcgcagttgggttgggtataccgaggctctaattaacaaggaggccagtaaccgctagttgggggtggggagatgagctcaccatcagggccatgcagaagtctagagctcaggcctgatccgtgtggacaggagacaacccggcatggggcaggggggtggggagggaggaggggaggggggcaagagcatgctactcccctcctcagccaccctcccttccccaggccacaagcgagttcacggaataggtgtggggacaggggcctacgcagagaatcatgcattttctcccacccaccgaaagtcttcgccgcccctgcgcatccccctccgcccccacccctgcccagcccgaccgaccctaccgcacctccgagctctgccggctccccgcagggcaccccgagacgagagctcctctcggattcgtgcgccatggttgtgggggaagtggagggccaggtggggtgggagacaatggatattgggattgagggaggcgatggccgctgggtctgcggcagcctctgcacccagcggcccagactgcggagatggagatcggcagcggcgggggcagggagcagcggcggagggggaggggagcgaggaggcggggagaagctggagtgagaaagcggggagaggggagatctgggaggagctgatgaggaggggagtttatggggaggagctgctggggagggaggcgggagctagaggaggcgggagaagggagcgctagcgggggcgtgggggcgggagctcagagctcgggagagtttccggaggcgcagtgacaggtgctgtgaagcactgcgggggtccacctttcccggtccctggccagctccccccatctgcagatgcctttgcccaggcctaccctcctccccccgccctcccctcctaagctctaggggcacagtgggaaacgtagccctgctcagtggagcaaggcgataggcttctcttatttttctttggataaaggatccgctgagcttggaaaaagtggattccagagagggtcgtctgatctcctcagaggtctgagggccagaagaagagggggagatcagaacatccactcctcaccagcacacacaccccaaaatattcgaagttttgtctcgtctttctcacttccattcccaccctacccccatccctctccacaaaagaagtttctcagggtgggcggctgcaaggtagaatttcccaggaagtcatttcaggactctctgcggaacactaagccccttcactccccgcccctcctccccctgaataatagctgaatgcaggttactccgcagatcgcccagcctacacaacacctaattcatagagtccatgcttatttaataagccatctcctatttagtaccctcttcctcctctattctcctcttgcaacattcctcacaccgtcactattaaagacagtgggtttggggagacgctagcctgcagaggcctacggaggcccacccagctctaacctgggggggaggggagccctcttgaaacaatgcggtaggaactaccaggcagccctcagtgtctaaagccctttcagccccagcctgatttgaatgcttagaaatagctaacacctgctcaccatcacagaggcagcctcctattcagacaggataagtaagaataaaatgcctcctggaccaggtattctggcattctcttttttaccttgaaatgagtcttaaagtgcttcccacttcctaaaatactttctcttacatgcaggaagtgaccacaagtccttggttttgtggtttccctgggcatcagtaaacctaaattgttttaatcccagttctattcttgcctcactgataaaactgagacatggtggtcagtcacaccatgttataccaccgtttccctcttcataaagtggtaatattgtagctgcagtattttactcagaaaaatattgtggggacaaaaaattgaaaaattggacaatattaatgtgtaaaccaggtatggtggtgcacacttgtagccccagctacttgggaggctgaggcaggagaattgctttagtccaggagtttgaggctgcagtgagctgtgatcacacctgtgaataaccactgccctccagcttcggcaacatagtgaggccccattactttaaaaaaaaaaaaaagccgggcgcggtggctcactgtaatcccagcactttgggaggtgggcagatcacgaggtcagaagttccagaccagcatggccaacatgttgaaaccccgtctctactaaaaatacaaaaattagctgggcatgatggtacacctttaatcccagctactggggcagctgagccaggagaatggcttgaacccaggaggtggaggttgcagggggctgagatcgtggcattgcactccagcctgggcaacaagagtgaaactgcgtctcaaaaaaaaaaaaaagtctaaaaaaattaatatgtacatgtgagatttttaaagtttggggagtcctgaatttaatcaatgagataatttacattgtcagtagcaaaataatcgaagtaaccttaaatacacatatactaaaattagatctgttttccatgttgtttgttaatcttattaatttctgaggtaagatattggctaatatcagcagcatatttcaaaggtaggaagtcttttattgcagtgggtgggggagctgaaacaacctatttaaaatattagtaacatccactttacttctcaacataaattttgcctgtgtttttaaacttaaaacagtttactgaattatgttttgaaacttcagataataaggctcttagcattgtgagtcataattctgaaatggacgggttctgtgcttccaggcctggacttacaaatgagggaggggggttctatttcagtttatggcaagtcacagttttgtgcaatgtggtttatttttacagataaggaaactgaagcttggagaggttaagtgacttttccaagttcacacagtaattcagtgaagcaagcattcagaattttgactcctgtccaatgctttctcaagcacatcaactttgtatggcttccctaatgctagagaaagggccctgtgtggcttctacctgccatttgctccctggccttagtcagggagagggaatcagatggaggctttctactgagcatttgttaattagcattgaacatttgatatccagttgctgttttgtcaagtcttctgacaagaaaagaaatccttttcttttcatcttctcctgggaaacactgtcccctttcttgctctttaatgaaatgtgctttctgatgcgtaatttgatctaagctcttctttaaggtaaatttagtccctggtgaaaggtgactggatcaacagccacctgtaagaggaaccctccatttctcagtactttgcactcactgcacatcctgaaaaggggggcaggattcttacacaaacatgaatgaagtcacaaatgcaggaataaactaaactggtaatggtgtccctagatagcagataaggtgaggtaagctatctccggtcaaatgcaaagtccggggtgggactaagacctggacaagcttgtttaaacttatagagagctgaaatgacaaagaaaagggaaaccaggtggcttcccttctaaatctagtgtcccatcagattgcttctttaggcttcagagagaactgttcgggagaacaaagagaaaaataggtgagttgtatgtagcagggtgatacatttgaacagcggttttcaaattttgctgcccattaggattaccagaagagagttttaaaatttttatgtttaggtgcagtggtctgttccttgtagtcccagctactctggaggctgaggcgggaggatcacttgagctcaagggtttgagactccatctcaaaatctcaaaaaaaagaagaaaaaaaaaagaaaagaaagtttaagcacagtgggtacctcatgcctataatcctagcacttttggaggccaaggcaggaggattgcttgaggccaggaatttgagaccagcctgcataacatagtgagacccccatctctgcaaaagcaaccaaccaaccaaacttaaaaaaaatccctgtgtccaggccacatcccaggctaattaattcataatccctgaggataggatccaggcattagtttgataaagctcctcaggtgattccaatgagaatacaaagatggtgacacaatgatgagacccacatggaggactgccctttccatcataccttccaccctgctcctcacagatcttacctgagctaaacttggccacaattgggacacagacaaaatgaactctcaatgctaaatcttcccatcaggtcccctccctacagtgcccacaaccacacattaacttccttgtatcctttcccagtgaaaaatctgcttccatgaatagaatttgatataatttacaccttactgtaagtttaagtgattgcatttctttcccaggtatgggtatcttgaagcatatttttttcttttttaattgatatttgagccatatttctttttttttctttctttttttttttttttttttttttgagacggagttttgctctcattgcccaggctggagtgcaatggcatgatctcggctcaccgcaacctccacctcccaggttcaagcgattctcctgcctcagccttcccaagtagctgggattacaggcatgtgccaccaagcccggctaattttgtatttttagtagagatggggtttctccatgtgggtcaggctggtctcaaactcccgacctcaggtgatctgccaacctcggcctcccaaagtgttgggattacaggcgtgagccatcgcgcccggccaccatatttctaattgtaaggtgaaaggctttgttctacagagttcaagcatcatccacccattaaggctggagtgaagtggcacaatcatagctcactgcagactctacctcccaggcttaggtgatcctcccacctcagcttcctgaatagctgggactacaggcatgcacaatcatgcccagctaattaaaatatttttttctgtagagatgaggtttcactatgttgcccaggctgtctggaatacctgggctcaagggatcctcctgccttgtccccacaaagtgctgagagtacagatgtaagccactgcctctggcccacttacttattattgacactgaacaatgctaattggtagcttccataattatgaattgattctgtaactattgctactgactacttcttagggaaatatctcatcttctcctccttactcctctttcctaaatgtagacacataataatcctttgcaacccagacctactaatgtaactatggcctatgtaacacagtagactaacaggcacaatgattggtacacctggtgctaagtgagaaaaagatatttgtttccagaacaggaatatcttagatcaaacataagaatgttcttttaatgaaaatttctttgacttcaaaggactcaacacttaacatggaattcataccattttggagctgggacttcagagatctgacactctcattgtcattgtgcacagtgattcagacctgagttaaagtcccagctctagaacattctaatatttgtgatcttgggaaaatttcttaatctctcccagagtttgttttcttatttttttttgggacagagtttcactcttgttgcccaggctggagtgcaatggcacgatcttagctcaccgcaacctccgcctcccaggttcaagcgattctcctgcctcaccctccctagtagctgggattacaggcatgtgccaccacgcccggctaattttgtatttttttagtagagacggggtttcttcatattgctcaggctggtctcaaactcccagcctcaggtgatctgcccacctcggcctcccaaagtgctggattacaggcatgagccaccgcgcctggccagccttttttttttttttgagacggagtctcgctctgtcgcccaggctggagtgcaatggtcgcccaggctggagtgcaatggtgtgatctcggctcactgcaatctccgcctcctgggttcaaacgattttcctgcctcagcctcccaagtagctgggattacaggtgtgcgccatcacacccagctaatttttgtatttttagtagagatgaggtttcaccttgttggccaggctggtcttgaactcctgacctcaagtgatttgcccacctcagcctcccaaagtgctgagattacaggcatgagctgctgtgcccggctgatttctcttctttaaaatgagggtactgccatacaaaggaaggaaattctgatacatgctacaacatgaatgaactttgtaaacattatgctttcagacaaatttgactttaattgagaaaaaaagagaaaacatactaagtgcaataaagcagacacaaaaggacaaatattgtatgattccattagtatgaggtacccaaacattatatgagtccattaatatgaaatttggcaaggtcacacatacagaaagcagagtagaggctaacagggctaagggaatgggagaatggggatttattgtttaacggttacagtttctgtttgatgatgaaaaagatattgaaacagcagtaatggttacataacatagtgaatgtacttaatgccactgaattgtacacttaaaaatggttaaaatggtaaattttattacacatattttacaataaaaaaattttagccaggtgtggtggcatgcacctgtaatcccagctgttcaggaggctgaggcaggagaatctcttgaaccctggaggtggaggtttcagtgagccgagacgtgccactgcactccagcctgggcaacagagtaggacttggtctcaaaaaaagaaaaaaattttttttgtaataataagggagttggggctgggcgtggtggctcacgcctgtaatcccagcactttgggaggccaaagtgggcggatcatgaagtcaggagatcgagaccatcctggctaacacagtgaaaccctgtctctactgaaaatataaaaaattagccaggtgtggtggcgggcgcctgtagtcccagctacttgggaggctgaggcaggagaatggtgtgaacccgggaggcggagctcgcagtgagccaagatcgcgccactgcaccccagcctgggcgacagagcgagactccgtctcaaaataataaaaataaataaataaataaataaaataataataataacggagttgggaggaaaaagaggaaatgcaaaaagggcctagcacagtacctgaatgctccacaaatattagccatgggtgttagttattatttgaatgtcaaaagctgaatgaagccctggggtaagaaaggtcacatgtgcccaaggtcacatagcttcaaggtccacactagattgaaaaccaagttttctgttttcttatctagtactctgtaacaccaggactgagatactctctattccaaaatgtgttttttctgatctgggaatacctaggttgagtggcccagggatcaataacctgagagatgaggctctttacttccaaatgtaaacagagcccccaaaactctacctttgccttctttcctctcttgctgttcttgctatctgccaacttccatctaaagtactcccctctctccctctagatctgtttggctgctgtcctggtttcttcttctcactaaatatctgggtttctgattgtttcctttatttcccagatgtactggtttgcatttttcccccagtcacatcctttgtgttctctaatccagatttctagactctgtaggggagagagaaggtttttttttttcctctctagagtttttaagtgaatagagtatttcctgcccatcacttatatgcaataactgttctgttaggttttgatgctctggttagggaagctgagcaaaaacggctggaaaacagatttttcagactgtttcttggtgatgtcttaggtcactgcagaattttggcttttaaaatatgtaacaaaggctcagcatttgcatgttgtatatggcacatattgcttacaagaaggcaaaagactcctggaaacattactggcaccctagactactgactaaatgtcttctgatactcatgatgatatccataatttcacaggtacaccaaaggatacatgtgcccctaaataagagcccttcctccctaactgtggagcatgctctggggtagaaggaagtcagatgcctgaagatcacataagtgaatagaaaccctgtctataaaaaattagggaaaaggagagctctcattctgttttgcagaatggatgctgccccattcatgattaagaaaatttattaatttaaaagaaaaccagaaaatgtgaaatttatatattataagcttataagatccaggaggaattttagatacgatcaaatagagccacctcattttgcagatgaggcccaatgacatccagatcataagtagcctaggatctttcactccaggggaattctgatgagaaaatccttaggctttcttacggtagatcttaacagagggtgctactgcttccttgctccttacatttgttcctgcctttcatagctcaaaggcaaattttcatcaaaaatttgttgatgccattgggtttaaacctttactgtttctatggggatggctttgtaacagcattaccatgcccccaggtggaagctatatcttaaagggcttgaaaatccattcaagacagccgctaaagatagcttttgactccctcacagaagatttttcctcagctatgatatggggaatgggtgagcagatgggagaagtaggaagaagaggagagaatgcttcttgggggtttggaggggtgttcagcatagttccacaatcaaaccagcaggagagcagaactgtgaggcaactctggggaggagttgaggctctaggggaagtctcctgtagagcacaagcaggaaacatccggcctatagcagcattaagaagggctaatgtgtctcaggagggaaggatgccatcaccatagaacctctaaatatgggcacagtaggatcccagaaaagcagtgtttcggggaggatgcgttctgcccaaaacatgtctgttaaggttattttgtagcacatggagcgctgatttgacctcaagtttttgttttttaacaggtggaaaggcaagtttaatctacaattttagtcgccaccaatacactctcttagagcttttcatgacacgtctcataaagaaatgctgatggccgggagcggtggctcacgcctgtaatcccagcactttgggaggccaaggcgggcagattacgagatcaggagatccagagcatcctggctaacacggtgaaaccccgtctctactaaaaatacaaaaaattagcccggcgtggtggcaggcgcctatagttccagctactcgggaggctgaggcaggagaatggcgtgaacctgggaggtggagcgggcagtgagccaagattgcaccactgcactccaacctgggcgacagagcgagactctctctcaaaaaaaaaaaaagaaaaaaagaaaaagaaaagaaaagaaaaaaaaagaaatgctgacgtttgccaagaggttcctgagttttggtcatactacagcacttgcaggcagtgtcactgcattcacatataatgataataacgatattcacacatattaagcacttatttatgctaggtatttttccaagggatttacacatattaactcatttagattttcacaacaacctaatgaggtagctagtatacacatctttatttcacagatgaggaaactgaagcatagagaggcaaaataaaccagccaaggtcacatagctaaccaagtggtggagctgggatttgtctaaaagtctggtttcagaacccttgtgcttaatcctatactatactgttgggtgtatcaactgtatgctaaacagttgcctgtctggagccaggacttccagactttcagtctgcacatatggagccataccactgacaagtatgtccaaaacttctttgatcctaagaattacctggacaattgcaaaatatatagattcccacaccctggctcagatgtactcacaatcaggcaagtttttaaaacccaggtttagtgggtttagtgagcactaccagccagccctgagcattaggaaattgaagtttttgtcctgattttgcttctgtctctcagactctgagcaatttcactcttcaattccctgcttgctctactgtctgcctgtcacttaacggaatgttacaagaatacatacaatttttccccctcataagggacacctgttgcttcaaaaacacggtatcctcataaaatgatatgcatgtagtaacaggtgtattttcttgcacttcttttgttttgttttgttttttgctttgctttccttgaagcacaaacctaagcccctcatccagacctagccttcagctgtcctccaggtgacacgcatacacaccccaaaccaggctgcattctgaccgaccttagctctctccctctgggagctctgatcggctctcagttcagcccaacaatgagaaacttttttctcgtctccctcaggggagccttcacgtttatccaattcattctcttgcaacccaactctccagaaagaaaaggggggaaaatcccaccccgaagagacggtcttcaggtctgaggacgttacttagcaacggcacaaagaccagtgagcaaagggagacctgaggagaaaactcttgggtggggagacagagccagtttgaaaactccatttcatccagagaaaaacaaggaaaacacaaacagaatcaatcccaagtaacaagcggggcttctccccagcgcaggtcatctcttactccctgcatctcaactccttcaaacccccagtgaccaagtccgcccccgcctggtttcgcccatggcccgagtgccctccccttgccctggcctgacccacacaggcttggacttaggggcccccacccctccccaggcacccaccgttctcagacgcgctgggaccttcgcagtccgagattaactgttggggtttccgctgctttcgccgagacattcccgggtagagagttgggagagggaggggcaacgctcacttggtcttaaccggggtgacctggtctcgtctcccccttgggtccgaagccaattgatgcctctcccccagcgcaaatcactgtgaagcagagatgttcttctttcccagagacacagactctctctctctctctgattctctgttcttgactctctctctttctctctcaatctttgcaagtctttaaaggggagacgccccctttttttcttcagcttcttccctacgcttctgcagctcccattgtaaaagcaaaaatcctaatctttccgcacactcttttcttttgtactgcagaggaaaggatttaaccctctcctccctgcaagggccctgggcctctccctgtgctgtctgttcagaaactgtccctggcttgtttttctaactcttcttccaagatcttcactgtgctttttggttctgtcatatttctatgcccctctgataatgtagctgcttttagggtataaactgaaataagaaccttctgatatgccctgattatgagtaatatatgtatagctctttataatttatagaatattttcatttataacgtgttttgaatgttataactctgagatgaacacagtaggctttactactcctatttatagctgagtccctttatagatgaatcaaaaggcccagtgaggttaagtaacttctccaaagttgcacagctgtgatgtatcagacacaggcctggaatccaggtgcatctgacagtagcctaacattgtttcctctatatcagtaaagacacaatatgccaccaaactgctatcatgaaaaacaaaagtgattgatctcaaggaatctcatttaaaatagcaatggctgggcacggtggctcacacctgtaatcccagcactttgggaggctaaggtgggcagatcatgaggtcaagagctggagaccatcctggccaacatggtgaaaccccatctctactaaaaccacaaaaattaggctgagcacggtggctcatgcttgtaatcccagcactttgggaggccaaggcgggcggatcacctgaggtcaggagttcgagaccagcctgaccaacatgttgaaaccccgtctctactaaaaatacaaaaattagctgggcgtagtggtgggcacctgtaatcccaactactccaaaggctgaggcaggagaatcacttgaacctgggaggcagcggtggcagtgagccgagatcgcgccattgcagtccagcctgtgtgacagagcaagactctgtctcaaaaataaaataaaataaaataaataaaaaggaatccctccatctccacaatacactgtttggcaacaaccaggtttctcctgcttagcctgtacactgagggtgattcatttatttttaacttctggctgtgatgttcctacctatatttgagtactactgagctactgggcatagaatattctggatatgccctgtcttctggcaataatgcctgggcccctttcttttagcatgatttctgttttattcttctggctgagatagcatctgaaacaccatcagttggaaaagtgggaagtattttccccttttaggattagtaatgtaaatctctgatggctttatcttcagagaaaagcaaaagaaagctcactcacaggtttgggtgcaaatttgaaggtttttgcatttcttcccttacacaatttcaagctagtttggcaataccaagaaaggaaaagggagacagcagatggcaggggtgctgctagtgataattgaagcaggtatccacattacatctgaagagttttggaaaatgctctcatctttgctttggagttcactgaatctccatttttttttccagtcctttggtgtcagggccctgggtggctttctcaagtctacccttggaactcttgttgctgacattatgtaattcatcctattaactcccctgtggtagacaggtgccattatttattactagaccattgtaggagaaataggggtactgagcctaggaaagcttctgattcctccgtggaatagactgagtcctgtcatcctctcaccccactgtttccatcatttatttccttccaggaagggaaaggagagaaggaaaatagctttctgcttttctcaggagtctgaaatctccaagggagcagatttcagggtccacatttgtcttttttcctgaatcttggctgtcttcatcttttcctatttttccccctccttcttgtgggtcttattgtgaaaggaaggactctttcccctcctcttctttcttcctccctacccagtttaccattttttttccttttacctctccactgtggcctcttgacctccccacagagttacaaaagtaaaatccttgaagagatgctgctgtgggaatgttaatgagccttccccacaaaggggcaaagactttacttcactgagttggaaaaaagcccctttgaaaaggggtttctgtgtgtggtgaagtggagaggggaggggaaggagagggatagaggcaaaagaagggagggagagaaaaagagcaagagaatgaaaggagacagagaaatagaagagagacactcaaacttcatactagaagagaatattaaaaataacaacaccacttttcttttttcaatttgtcatctaatttttgggaaatgttccttggtcttttgaccttgtaaactcagggcttacattcccaagaagctgaagagggactcgagagcatgggagataataaacgataggaagaagggacttatcttggcaccccacccccagtctcttcccatatacgagagccagagctagagaggctctagggtggttgggaggggtgtgtaatattctggattgggggaactggtggtgaagatgggctcttttttctggatttgtggttgattcttatgatattttctaattttatcaacatttcttattttggcttccctattggatgttggtctaataatttatctatcttcaggaatcgtttacagcattgttgaggtgttttcgtcaaggagccaattttcaagccaggccacttgtgcataatctctctttccttcatttgtgtgcacaggttgcctctggattagttaaaatgaatgttaaggtatttgggtgtcaaaattaaatccttaaaaaaatatatatatgtttttgctttttatttttttaccctcatcttcttctatgtgatggtatcttgttgctttttttttttttttttttttttttttttttttttgagacagagtttcgctcttgttgcccaggctagagtgcaatggagagatctcggctcactgcaacctttgcgtcctgggttcaagcaattctcctgcctcagcttccagagtagctgggattacaggcatgtgccaccatgcctggctgattttgtatttttagtagagatggggtttctccatgttggtcaggctggtctcgaactcctgacctcaggtgatccacccgccttggcctcccagagtgctaggattacaggcgtgagccactgcgcccggctcctgttgctttttaaagaaagctgggccgggtgcagtggctcacacctgtaatcctagcactgtgggaggccaaggtgggcggatcacgaggtcaggagatcgagaccatcccagccaacaaggtgaaacccgtctctactaaaaatacaaaaaattggccaggggcagtggttcacacctgtagtgccagcactttgggaggctgaggcgggcggatcacgaggtcaggagttcgagaccagcctggccaatacagtgaaaccccatctttactaaaaatacaaaaattagctgggtgtggtggcgcgtgactgtggtcccagccacttgggaggctgaggcagaagaatcgcttgaacccaggaggcagaggctgcagtgagccaagatcacaccactgcactccagcctgggcgacagagcaagactctgtctcaaaaaaaaaaaaaaaaaaaaaaaaaaaaaaaaaagaagaaaaagaaagctggccaggtgcagtggcttatgtctataatcccagcactttgggaggctgaggcggctggatcacttgagtttaggagttcgagaccagcctgggcaacatggcaaaactctgtcactacaaaaacatactaaaaattagccaggtgtggtggcgcatgccagtggtcccagctactcaggaggttgaggtgggaggatcacttgagcccaggaagtcaaggcttctatgagccatgcatgatcagtgatcaaactggtacactccagcctgggtggagtgagaacctgtctcagaaaatgaaatagccgggcgcggtggctcatgcctgtaatcccagcactttgggaggccgaggtgggtggatcatgaggtcaggagatcgagaccatcctgactaatatggtgaaaccccgtctgtactaaaaatacaaaaaaattatctgggcatggtagcgggtgcctgtagtcccagctacttgggaggctggggcaggagaatggcatgaacctgggaggctgagcttgctgtgagccgagatcgcaccactgcactccagcctcggggagagcgagactctgtctcaaaaaataaataaataaataaataaataaataaataaataaataaataaataaaataaaatagtaaaataaaataaaaaatgttagtcattgtatttgactctcagagtttcctacatgctgttttgtggtatcagcccaacaccccagttaaaaccaggaactgcgaggagcaaggagaaggtgattggagtgacatctcaggaagagaaagatgaggagccagtcacgaatgcttattgccagagctctctactctcttttggtctagtgactcccaaacaccacaatcacatggggaatttatggagaattcacattcctgggctcccccacagatttacttaatcagaatctctgggggtggagcctaagatatttaaacaagctcttgaatgattcctttgcagggttaaatttgaaacaattatgtttgactggttttggatacccatgaaccaagcgctgcctgtggacgaaatacataacatgcttcacaaatgtgtgtactgcctttagccaaatgttttgatgttgttaagatgaatacacttggcctggcgcagtggctcacgcttgtaatcctagcactctgggaggccaaggcatgtggatcacaaggtcaggagttcaagatcagcctggccaagatagtgaaaccccgtctctactaaaaatacaaaaattagctgggcgtggtggcgggcatctgtaatcccagctacttgggaggctgaggcaggagaattgcttgaacctgggaggcagaggtcgcagtgagctgagatctcaacattgcacttcagcctgggcaacaagagcaaaactctgcctcaaaaaaataaaaagaagaagaagaagaaattttaaaaaatgcttctgaccgggtgcagtggctcacacctgtaatcctagcactttgggaggtgtaggcgggcagaccacctgaggtcaggagttcgagaccagcctggccaacatggtgaaactccatctctactaaaaatgcaaagattagctgggcgtgtggcgcatgcccgtaatcccagctacttgggaggctgaggcaggagtatcacttgaacccaggaggcagagactgcagtgagccgagattgcgccactgcactccagcctgggtgacagagtgagactctgtctcaaaaaaaaaaaaaaaaaaaaaaaaagcttctaagcttctagggggtttttccctaaaaataaaatggtagtcatgagggagtctggaaaactttttgccatttcattcaatgccttttctctcaggaaaacactctgctcttattcttctttttctagtttgttttcagaaatggaggtattgtggaggcattttctctaccttctgaagcgttagaatcctatgatctcatgacttgatttaattgcaagagaaatgaactaggaatctagaaacacatgtactgtttcggttgataataatcatagctgtggtgcattctgtgcaccctgccctttggacacataatctcattaaatctttaaaataattttgcaaagggagcattatatagtccccatctcatgcatggagaacaccccaatttacaaataaggaaactgaggcttagagaggccatatagcttaatagctcaaggtcttgtagctgataaagagcagggttgaaatttgtgcaagcaatgcctgattggacagcctatgtttttttcacacaatttaatactttattgccatctggtgatttctgcttctgttatgggccttgccttctggctgcagacctggaggataacttaaaattacaaattgcaaagaaaatttgaagatctacaaagtcaacatttattaaaattatggatcttataataacatatactgtcacatgttctttgtcttgctagcattaaggaagtgagagaatacagagttagggtaaagcgccctttgcaaaactttcctaaataagaaagccttggcaaacaacctctggtcttattagatgatttccgcctaacctctttcaggtggtagttgccatggtgttttaggggaagaggaagggagtgaagatcaaggagggtcattcagactgagtgttgtctggtgtttcttttcagagttcattcagcagaagatggaaggaatttaaacgttcagaggaggaacgatagactttattctttttgcttttcttcatttttccacttctcattcctcatgttaaatataagggaattgggagaatgtaaagaggacaaggtagtcggacaggaaagggaggttgtgggggaagggccaagagcctagcagccagcggagagaaggatagggtggtggcagggagttggcggggagagagagagtgctttcgagggataaattataaggatatttgttaaagttctggggatcctaaggttggccattagaaaaaaaaatcctcagagggtggggataaagtagaaaccatagcatgaggagagaggacaataagaaaggcaaaaaaccacaaaaagataaacagagcaatcaaaaaggaaaacaaatcaatgatgggaaagaaagagttaaatggcagaggcaagtctttggaggaactggaacatacgggttgaagtatgacagagaatatgaataattgataacttataatagaaatgtggtcagagcatccaggagaaacatttaagaagagaaacaggccagccgggcgtggtggcccaggcctgtaaccccagcactttgagagcccgaggtgggaggatcccttcaggtcaggagttcgagaccagcctggccaacatggtgaaaccgcatctctactataaatacaaaaaaaaaaaattagctgggcatggtgcacgcgcctgtaataccggctactctggaggctgaggcaggagaatctggaacccgggaggcagaggttgcagtgagctgagatcatgccattgcactctagcccgggcaacagagagagactcggtctcaaaaaaaaaaaaaaaaaaaaaaaaaagaagaggaacagggcgggcgcggtggctgacgcctgtaatcccagcactttgggaggaggagcaaggtagatcacctgagttggggagtttgagaccagcctgagaaacatgaagaaactctgtctctactaaaaatttacaattagccaggtgtggtggcgcatgcctgtaatcccatagctactcaggaggctgaggcaggagaattgcttgaacctgggagggggaggttgcagtgagccaagattgcgccatcacactccagcctgggcaacaagagcgaaactccgtctcaaaaaaaaaaaaaccacaaaaaaacaaacaaaaaaaataccttttagtgagttaataatctattcaccattttagagatcattccaggaaagagatactgagaaacttcttgatgatgtctaattaattcctaattatattttaagtgaaaattatttcaatatgtccttggttgagtttattcaacaaatattttttgggcacctcctgtgtgctaggtacgtagtatacgatgggaaataaaacagattctgccctgttgattattataccaccattttgtaattatttggacttcattctttcttttttttttttgagacggagtctcactctgtcacccaggctggagtgcagtggcatgatctcagctcactgcaagctccgcctctcagattcacgccattctcctgcctcagcctcccgagtagctgggactacaggcgcccaccaccacacctggctaatttttgtatttttagtagagacggggtttcaccttgttagccaggatggtctccatctcctgacctcgtgatcctcccgcctcagcctcccaaagtgctgggattacaggcatgagccactgtgcccggcctattctttctttatttttgggacagggtctcactctgttgcctgggctggagtgcagtggtgcagtcttggctccctgcaacctctgcctctcagattcaagggattcttgtgcctcagcctcccaagtagctgggattacagaaacacaccaccatgacccactaattttttgtagagacagaatctcactatcttgctagggctgatctcaaactcctggggtcaagcgatcctctcacctgggtgttccaaagtgctgggattacaggcatgagccaccatgcttggccctggacttcattcttttggtgatatctctttgtgatttttattggcacggtctggtaaagttaagtgtattagtctgttctcatgctgctaataacaacatacctgggactgggtttttttttttttttttttttttttttttttgagacggagtctcgctgtgtcgcccaggctggagtgcagtggtgcgatcttggctcactgcaagctctgcctcttgtgagacccattcactatcaagagaacagcaggggaaagacccagccccatagttcagtcttctttcatcaggtctctctcataacacatggtaattatgggagctacaagatgaggtttggatggggacacagagccaaaccatatcattccacccatggtccctctcaaatctcttatcttcacatttcaaaaccagtcatgccttcccaactgtcccccaaagtctcaactcatttcagcattatttctaaagtctgtagtccaaagtctcatctgagacaaggcaagtcccttctgtctatgagcctgtaaaatcaaagcaagttaattacttcctagatacaatggaggtacaggcattgggtaaatacacctattccaaatgggagaaattggtcaaaacaaaggggctacaggccccaggtgagtccaaaatccagggggacagtcaaatcttaaagctccaaaatgatctcctttgactccatgtctcacatccaggtcatgctgatgcaagaggtgggttcccatggtcttgggcagctctgcacctgtagccttgcatggtacagcctccctcttggctgccttcacaggctggtgttgagtgtctgcggcttttctttttttttgaaacagagtcttgctctgtctcccaggctggagtgcagtggcgccatctaagctcactgcaagctccgcctcccaggttcatggcattctcctgtctcagcctcccgagtagctgggactacaggcacccaccaccacgcccggctaattttttgtatttttagtacagatggggtttcaccgtgttagccaggatggtctcggtctcctgacctcatgatccgcctgcctcggcctcccaaagtgctgggattacaggcgtgagccatcacgcccggcctgtgtctgtgacttttctaggtgcatggtgcaagctgttggtggatctaccattatggtgtctggaggacggtggccctcttttcacagctccactaggcagtgccccagtgaggattttgtgtgggggcttccaccccacatttcccttccacactgccctaacagaggtttcccatgaggaacctgcccctacagcaaacttctgcctgggcatccaggcatttccatatatcttctgaaatccaggcagaggctcccaaacctcaattgttgacttctgtccactcgcaggctcagaaccatgtggaagctgccaaggcttggtgcttgcaccctctgaagccacagcctgagctctccgttggcttctttcagccatggctccatggctggactgtctgggatgcagggcaccaagttcctgggctacacaaggtatggggaccctgggcctagcccaggaaaccacttttttctcctaggccttggggcctgtgatgggaggggctgccacacaggtctctgacatgccctggagacattttcctcattgtcttggtgattaacatttggctcctcattacttatgcaaatttctataggtggcttgaatttctcctcagaaaatgggattttctttactatttattgcattgtcaggctgcaaattatacaaatttttatgctctgtttccgttttgaaacagaatgcctttttttcttttttgagatggagttttgctcttgttgcccaggctagagtgcaatggcctgatctctgctcactgcaacctctgcctcccgggttcaagcggttctcctgcctcagcctcccaagtagctggtattacaggcatacaccatcatgcctggttaattaattaattaattaattatttgagatggagtctcgctctatcgcccaggttggagtgcagtggcgcgatctcggctcactgcaagctcctcctcccaggttaacgccattctcctgcctcagactccggatcagctgggactacaggcacctgccaccaagcccagctaattttttgtatttttagtagagatggggtttcaccatgttagccaggatggtctccatctcccgacctcatggtccgcccacctcggcctcccaaagtgctgggattacaggcgtgagccgccgcgcccggccacagaatgcctttaacggcactcaagtcacctcttgaatgctttgctgcttagaaatttcttccaccagataccataaattatctctcaaagtcaaatttccacaaacctctagggcaggggcaaaatgccaccagtgtctttggtaaaacataacaagagtcacctttactcccattcctaacaagtttttcatctccatctgagaccacctcagcctggatttcatagtccatatcattatcagcattttggtcaaagccattcaacaagtctctaggaagttccaaactttccacattttcctatcttcttctgagccctccaaactgtttcaacttctgcctgttacccagttccaaagttgcttccacatttttgggtatcttttcagcagcaccccactcccagcaccaatgtactgtattagtcttttctcaatgcaccaggtctctctcacaacctatgggagttatgggagctacaagatgagatttggatgacacagagctaaaccatatcagtaagcattattttatgtatttatttatttaattttgagatggagtctcactccggctatcacccaggctggagtgcagtggcgtgatctcggctcactgcaacctccgcctcctgggttcaagcaattctcctgcctcagcctcccgagtagctgggattacacgcacctggcatcacgcctggctagtttttgtatttttagtatagacagggttccactgttttgaccaggctgctcttgaactcctgaccttgtgatccacctgctcagcctcccgaagtgttgggatgacaggtgtgagccaccacgcccagcagtaatcattattttaatacccctttatatgaaactgaggcacctaggttttttttttttgtttttttttttgacagagtctcactctgttgcccaggctgaagtacagtggcatgatctgggctcactgcaacctctgcctcccacattcaagcaattctcctgcctcagcctccggagtagctgggattaaggtgcctgccaccacgcccagctaatttcttgtatttttagtagagacggggtttcaccatgttggccaggctggtcttgaactcctgacctcatgatttgcctgccttggcctcccaaagtgctgggattatagggcgttacacccacaacctggttttttttttttttttttttttttttttttttaagatggagacttgctcttgttgcccaggctggagtgcaatgctgtgattttggctcactgcaacctctgcctcctgggtataaatgattctcctgcctcagcctcctgagtagctgggattctaggtgcccctcaccacgcctagctaattttttttttttttttttttttttagacagagtcttgctctgtcacccaggctggagtgcagtggcatgatctcggctcactgcaagctttgcctcccgggttcacaccattctcctgcctcagcctcccaagaagctgggactacaggagcctgccaccatgcctggctattttttttgtatttttagtagagacggggtttcaccgtgttagccaggtctcaatctcctgacctcgtgatccgcctgcctcagcctcccatagtgctgggattacaggcgtgagcagccatgcccggcctcacgcctagctaatttttgtatttttagtagagacggggtttcaccatgttggccaggctggtctcgaactcctgacctcaggtgatccacctgcctaggtctcccagagtgctgggattacaggtgtgagccactgtgcccagccctaggtttggtttttttgtttgtttgtcttcttttgagactcagtcttcctctgtcacccagggtgcggtgcggtgcagtggcaagatctcggctcacctcaatgtccaccttctgggttcaagcaaatctccttccttagccttccgagtagctggggattacaggcatgcaccaccacacccagctaattttgtgtttttattcttttatttttatttttatattctccatgttggtcaggttggtcttgaactcccccaccctcctcaacctcccaaagtgattacaagtgtgagccacagcacctggccatgtgatgctttttttttttttttttttttttgagatggagtctctctctgttgcccagggtagagtgcagtggtgcgatctcggctcactgcaacctccacctcccgggttcaagagattctcctgcctcagcctcctgagtagctgagattacaggtgcacgccaccacatctggctaatttttgtatttttagtagagacggtgtttcaccatgttggtcaggctgatctcgaactcccgacctcgtgatccacctgcctcagcctcccaaagtgctgggatttcaggcgtgagccactgtgcccggcccatgtgatgctttttaagggatcccaataggcaagccaggaaggcagccaatgatatgtagcaattgctggaggcagtgacagttgatggcagaaggttcttttggaagcagatgggaaagagtacctgatagtgactatgaacagggtggctgggccatggggaagttagactcaaagtttagtatcactggatttggtagaaaaaagtggggattgtaggggaaggacttaatgactacattatgtgtctatgagatttaggactacattttccttatttgattcaatgacctctgctcccatcttttggtcaagggataaatattaccaggatgtgtgtgtgtgtgtttccaaaaaattggatggaagtcttgaagaaaagagaggggaaggagagagacctgagagaaataagcctgttactcaagataaattattctttccattacctacctccgtctctcccttccaaacatctactatccttccatacacaccatttgtaatctgattacaggtgcctgccaccccacctgactaatttttgtatttttagtagagacagggtttcaccatgttggccaggcttatctcgaactcctgcgttcaaatgatttctccacattggcctcccaaagtgctggggttacaggtgtgagacactgcacctggcctcatcagattcttgaaacaaacctaggggtcgggtgcagtgtctcacgcctgtaatcccagcactctgagaggccgaggtgggtggatcatgaggtcaggagttggagaccagcctgaccaacatggtgaaaccccgtctctactaaaaatacaaaaattagccaggtgtggtggcgcgagcctgtaatcccagctactcaggaggctgaggcaataagaatgaaactccatcacaaaaaaaacctaaataataataataatcgatgctgttattatccaaatgaacaaaaccactaaactagaatcgcttgaacccaagaggcagaggttgtggtgagccgagatcatgccattccactccagtctgggcaacaagagtgaactctgtctcaaaaagaaaacaaaaaacaaacaaaacaaaaaccggtaggctgggcacagttgctcacacttataatcctagcactttgggaggctgaggtgggaggattgcgtgaggcctggaattcaagacgaggctgggcaaaatagcaagaccccgtctctacaaaaaatacctactgggcatccactctatgccagctgggcatgatgcatgtgaatataacttcatatcctttccactctccaaggatttatattgaaagtccacttgacaaatagaactcatatgacatacattttcatttttagtggaaaaaccatcgaacttgggttctagtcaaattctttctattcccagttaaatccccttggggccaggcatggtggctcatgcctgtaatcctagcactttgagaggccaaggcaggaggactgcttgaactcatagtatgagaccagcctgagcaacatagtgagacctcatctctactcaaaaaaaaaaaaaaaaaaaaaaaaaaggccaggcacagtggctcatgcctgtaattccagcactatgggaggacaaagcgggcagatcacttgaggccaagaccaccctgggtaacatggtgaaaccctatctctagtaaaaatacaaaaattagcccggcatcagggtacacgcctgtaatcccagcagctcgggaggctgaggcaggagaatcgcttgaacccgggaagtggaggttgcagtgagccaagatcgtgccactgcactccagcctgggcaatagaatgagactcctcaaaaataaataaataaataaataaatagataaaaattatccaggcatggtggcagcctgtagtttcaggtacttggaaggctgagataggaggatcacttgagcctggcagattgagtctacagtgagcagtgatcacaccactgcacaatccccttaggaattttcccaagtgtttacctctcagacctcaatctgcattgatggaattagacccaatgattttcttacccagctttaacagtttgtgcttgcatatgtgaacatctgtatcaatcaacaagatgcatctattgcaacaatttctacatagggtcctacaataataaatctatgatggtaattttctttctttctttctttctttctttctttctttctttctttctttctttctttcctttctttctttctctctttctttctttctttctttctttctttctttctttctttctttctttctctctctctctttctttctttttctgtcttcttttttttttttttttgacagtctcactctgttgcccaggctggaatgcagtggtacaatctctgcctcctgggctcaagtgatcctcccaccttagcctctcaacttcagcctcctgagtagctgggaccacaggtgcatgccactatgcccagctaatttttgtattttttgtagggacagggttttgccatattggccaggctggtcttgcactcctggacttaagtggtctgcccacctcagcctcccaaagtgtgattacaggtgtgagccacctcacatggcccctgatggtcatttctaaaccattacttaagacgaggtctagagtcaaagtcgaaaaatttctgaggaaggaatgcccaagagactgcttttgctctggtattagaacaagttcttgtcatttatttggcgaatattggaggaagtagttggcctgcatttatttatgcggtaggtagaataaaactatgcacttctcaatataggatcacactcatgcttatatagagagggacaggaggacagagagactcaacctgggctaactgcatggaatgccagagtgagattccgttgcattctttacattgctgttggggaatcctaattatagtttaatttgcatattcaaatttaacttgtattaaattaaattaaaatatgaaagtccatcaacaaacctcaggtctgctaacctctgtgacctccagaagtaagtccaatcaaaaaccaaagcagcttagacattcatgattctgtatctccagatggcagaatcacctcaggatttagcccaggccatagaaatcctttccttcttttgggacataagctccaaggtagatcttctaatttgttacattttcaacaaacatttggcaaatgcatttgagatttcacttaccaggcctgcatttagggggaaagtagagtgaacgagtagacatttctcaacatagaatcacattcatgctcatattaagagagagatgagagaactgggatgctggggttacaaaggcaaataagacacaggccctgcttctccctgggaggaggggcaatttcgaaaagataaagacgatacaacatgagaaactgtcgtaaaggtatacataaagttccctgggaagaagggagacttgaataatactacctgagtgaactgaagagattttcagagaggaggtcacatgtaagatggatgttatgcacaatatggtttagatgaataaagaaatggtgagtccagtcacggtggctcacgcctgtaatcccagcactttgggaggccgaggcgggaggatcacttgagcctatgggtttgagaccagcctgggcaacatagcaaggccctgtctctacaaaaaatacaaaaattagccaggtgtggtggcagcacatgcctgtagttccagctgttcaggaggctgaggtgggagaattccttgatcccaagaggttgaggctgcagtgagctatgatcaggccactgcatttcagcctgggagatagagcaagactctgtctcaaaaaaaaaaaaaaaaaaaaaaaaagaagaagaaaagaaaaaagagtagaaatgtatagggaaagaaaatttgaaaagaagtttggggtgagtgtaaaagaccatttatgctatattaacaaattgaatattatgagaagacactggaagttttaaaacaaagaatatagctgtattttattattattttaataattttatttatttatttattttttgagaccatgtctcactccatcacccaggctggagtgcagtggcacaatcttggctcactgcaacctctgcctcctgggttcacgtgattctcctgcctcagcctcctgagtagctgggattacaggtgcctgccaccatgcctggctaattttttgtatttgtagtagagacggagtttcaccacattggccaggctggtcctgaattcccggcttcaagtgatccaccagccttggcctcccaaagtactgggattataggcatgagccactgcgcctggcatagagctatattttagaaggtcaaccattgaaagtgtggaaaatgatttaaaattggaaagagactgaatggacagaagagataccagaaatccaggcaagagatgaagagtgaggctggccacggtggatcatgcctgtaatcccagcactttatttatttatttatttatttatttatttatttatttatttatatatattttttgagatggagtttcactcttgttgcccaggctggactgcaatggcacgatctcggctcaccgcaacctccacctcccaggttcaagcgattctcctgcctcagcctccctagtagctgggattacaggaatgcgccaccatgcccagataattttttgtatttttagtagagacagggtttctccatgttggtcaggctggtctcgaactcccgacctcaggtgatccgcccacctcggcctcccaaagtgctgggattacaggtgtgagccaccgcgcctggccatttttatattttttataaaatagagacagggtctcactatgttgcccaggctggccttgaacgcctgggctcgagtgatccttccacctcagtctcccaaagcattaggattacagggattacaggtgctccccatcatgcccagctaatccaggctggtcttgaactcctgacctcaggtaatccacctgccttggcctcccaaagtgctgggattacacgcatgagccactgcacccggccaccaagttcacaacatttgatagttaatattattacactgttctgcatagagaacaagaggtgagtgctataagcaatgcagatcaactgcatacaagttcagaggaaggaaaggccatttccaattggagggcaggagggtgagcagattaaattagaataatgaagaagtcacttaaattggggatttcaaaagaacataagggccgcgcacgggtgcctgtaataccagcactttgggaggctgagcggggtggatcacgaggtcaggagattgagaccatcctggccaacatggtgaaaccccgtctctactaaaaatataaaaattagctgggcgtggtggcacacacctgtaatcccagctactcaggaggctgagaaaggagaattgcttgaacctgagaggtggaggttgcggtgagccaagatcgtgccactgcactccagccatgtgagagagtgagactttgtctcaaaaaaaaaaaaaaaaaaagaaaaaagaaaaaaaaaagtaagatgaacatttagacgataaaacttagagaaggcttagtgatccggaagaaagaaagaagcttgtcacctatcatttgtagaagtgacaagcaataaaaatgtaagcaaataaataactacagaatgaatgataattaaacagggtagtgggtcagaaagtgaagagaaagagtggggctggtggttaaggaattagagggaagacttgattccatctcaaggtagaaagctgttcatatgcagatcaactgctatctgtgaatggatacccgaatattgtcacaaacaaactgaaatgcaaatactcttagaaactggggtattagtaatgcaagtatgaaaaacatctgatttaagcagaacaacaacaacaaaacaccctcatcattctttgaatgacttaatctgtgaatgaaaacattcacatcctcatgattttgatgacagaatagatgatttttctttgtgctgagtttgttatctcaagctggaactaagtaaggctagtcaaggccatctgattcttattgctcattcattcattcattcattcattcattcaaccaatattttactgagagcttgctgtatgcggaattatgctttgcctggggaatgcagtggaggttttttccttggagttctcttactccaaagggctttaaccttggacaggttctgacacttgtctgctgacgtttttgttttgttttgttttgttttgttgagacagggtcttgctctgttgcccaggctggcaaaaagataacggctcactgtggccttgaactcctgggctaaggcgatcctcccactgcagccttcagagtagctgggactataggtgtgagccaccatgcccagctaattaaaacaatttttttttttttgtggagatgggatctccctctattgcccaggttggtctcaaactcctaggctcaagtgatcctcctgcctcatcctcccaaaatgtcgggattacaggtgtgagccatggtgcctagcctgttgatttttttttggataagagatagagaggacctggtaatatacaaggcccagagtgtgtcctaagatgatctatggggagagaacagagtatccctgactgaagagttttggaaactattttaatgttccccaattttatttgaactaaaaaacattgtctgcctttcacattccttcgtgcactccacctcaccactgctcccccggcacctgttggcctcttttgctatccaaatttaccaaataaatcttccccgcctttctacccatctgctgttcttcacagcttgtctctgggctcagccccaagcctggaggggcagtaaatggattcagagttgctgctcaaacatggattcccatggaaaccaaacgactaagaaaacaaatagggaggaagaggcagccactgcctgacctcttaccctccccctccaaattcttttcgcttttcagcatgaaagcaagcgcttatttgtataactagtagaaggacataacctgacccctccccccacccccaaattctttaagaatctctcgttcgacaatgagtaaatgaaagacagtgggacatcgccacctggtggtagaaatgccaaaatacttaagaagagagaactcaattaacaagtgaaagcctgcgatacaggccagtaagtatacaaagaagtaacattcagatacaaaaataagatacaaagaagtaacattcagaagccactcctaggaaactgtttaattgtgatgcagttagtacttgttccttctcacatatacagatttaaatatcatctttatgttggtgaatttttatttttattttttaaaaattttatttatttatgtatttatttttgcgacggagtctcaccctgtcgcccaggctggaacgcagtggcgcaatctcggctcactacaacctccgcttcctgggttcaagcgattctcatgtctcagcctcccgcgtagttggggattacaggcacctgcattatgcccggctaatttttgtagagacagggtttcaccatgttggccaggctggtcttgaattactgacctcaggtgcctcagcctcccaaagtgctgggattacaggcgcgagccaccacgcccggccgaatttttttttttttttttttgcatccaattcaaatatgggaacatgaggtttagtcttatctctcccaactccataccagattttttttttgtttgtctgtttgagacggaatctcactctgtcgcccaggctggagtgcagtgatgcaatctcagctcactgcaacccccacctcccgggttcaagcgattctcttgcctaagcctcccgagtaactgggactaatacacgcacacgccaccatgcccagctaacttttggatttttagtagagatggggtttcaccatgttgagcaggctggtctcgaactcctgacctcagatgatccacccgcctcggcctcccaaagtgctgggattacaggtgtgagtcactgtgcccagccatattagatattttttatctgaacgtcatgctgttgctacagattcagtggagttggacagtacttttctcttcccgtcctttcccttccatagggtagcatttgctggcttacaaaggaaaagcagaagctttgctccactatcttgtcttgtcttgtcttgtctcttttctttttcttttttttttcgtcttctgttcagatagtctcactctgtcacccaggctagagtgcagccgtgttatcatggatgggttactgcagcctctaattacctggcttgagcaatcctcccacctcagcctgctgagtagctgggactacaagtgcacgccaccatacccggctaattttactttttttttctttgagacagagtctcactctgtcactgaggctggagtgcagtggcatgatctcggctcattgcaaccgctgcctcctgggttcaagagattctcctgtctcagcctccagagtagctgagattacaggtgcgcaccatggcacctggctaatttttgtatttttagtagagatggggtttcaccatgttggtcaggctggtcttgaactcctgacgtcatgtgatccacccgcctcggcctcccaaggtgttgggattacaggtgtgggccactgtgcccggcctttctttttttaaagacaggttgcaaggtggtggctcatgcctgtaatcccagcactttcggaggccgaggcgggggtattgcttgagctcaggagttcgagaccagcctggccaatgtggcaaaaccccatcctatgaaaaaatacaaaaattagccgggcatggtggcaggcgcctgtaatcccagctattctggtggctgagtcaggagaatagcttgaacccaggaggcagaggttgcagtgagaggagatcaagccactgccctccagcctgggtgacaaagtgagactgtctcaaaaaacaaaaacaaaattataaaaaagagaagaagctcaacaactgatatgtttttcccggcatgaatatttttatattgaggaaaaataaatcacttaaaatttttttaaaagaaagagggtatactaaaaatacaaaaattagctgggtgtgatggctctctcctgtagtctcggctactcaggaggctgaggtgggaggactgcttgagcctgggaggtggaggctgcagcccacaacattccagcctgggtgagaaggaagaccctgtctaaagaaaacaaaaacaaacaaacaaacaaaaatgagtggaattggccgggcacggtggctcatgtctgtaatcccagcactttgggaggctgaggcaggcggatcatgaggtcaggagatcgagaccatcctggctaacacagtgaaaccctgtctctactaaaaatacaaaaaaattagccgggtgtggtggtgggtgcttgtagtcccagctactcgggaggctgaggcaggagaatggtgtgaacccgggaggcggagcttgcagtgagccgagattgtgccactgcactccagcctgggcgacagggcgagactccgtctcaaaacaaaaacaaaaacaaacaaacataaaaagagtggaattgttccctttaaccctcaattcatatgttgaagccctaacctccaatgtgattgtatttgaagatagacctttaaggaggtaattaaagttaaatgatgtcatgagggtagggccttaatccaatttgattggtgtttcttttatttgtttgtttgagacagagtcttgctctgttgcccaggctggagtgcagtggcacaatctctgctcactgggtttgtgtgattctcctgcctcagcctactgagtagctggaactacaggcatacaccgccacacccagctaatttttgtatttttagtagagacggggtctctccatgttggtcaagctggtctcgaactcctgacctcaggtggtccgcctgcctcagccttccaaagtgctgggattacaggcgtgagccactgtgcccagcctgattagcgtttgtatttatttttattttttgttattttttaaaataatttttttttaaatttttgagactgagtctggccgttgtcgcccaggctggagtgcaatggcgtgatctcagctcactgcaacctcagcctcctgggctcaagcaattgtcctgtctcagcctcccgaatagctgggattacaggcatgggccaccacgcccggctaatttttgtattttttagtagagacggggtttcaccatgttggccaggctggcctccaactcctgacctcgtgatctgcccgcctcggcctcccgaagtgctgagattacaggtgtgagtgaccgcacccgatgtggttagcatttttataagaagagaagaaacaccaggaatatgtggtcacaaaggaaaggccacgtgagggcacaaggagaagctaccatctgcaaactgtgacaagaggcctcaggttggtttccaatcctgctagcacattgctcttagccttccagcctgcagaactctgagaaaataagtttctgttgtttaagtcaccctgtctgtgatattttgttatagcagactaatacctggccttccataccataagctcctttccctatataatttgcaataaacagaggcctggagaatggagacaaagctattctggagacccaggggtctaggctaccttgcctttgcctcatttcacacttcaggctatatgagctctatccccaggaaaattcagctcttgctatttggattcattaagtggagaatagaatgagatctgttttgggtatcaggccagaaattatcagcatcttggaacgtcagaaaataatggatcagtacccaagttacttagtctcaccccatacagtcttccaccacctacagctgggtactataacaacacatcctaagagaaaagaggctcagagacttctttagcctaagaacctctaggacctaactccccagaagccttagcgtcaggtcaagtaaaggagcacacacaggatagagagtggaaatgtttctgtttttttttgtttttttgagagggagtctcgctctgtcacccaggctggagtgcaatggcatgatcttggctcactgcaacctctgcctcctgggttcaagcgattctcctgtctcagcccccgagtagccgggactataggcacacaccacaacgcctggttaattttttgtatttttagtaaagatgaggtttcaccatattggccaggctggtcttgaactcctgacctcaggtgatctgcccgcctcggcctcccaaactgttgggattacaggcgtgaaccaccgtgcagccgggaagtgtttctttcactggaggggcagaggtagttgtgatgaccctactgtggccctggggagaagagtgagaggataacagtgaacaaggggctaagtgaagttcttagaagtagggtggaatgagtgtgagagaaagggggaagctagtgaggcttttctcttatgctgatgtaaagtaggtttccaatagaagaaatttataagtaatacagaggataggatgattaatctaaattggaccagagcagagttttgttggccccagaggttttaagattttgtttaggtaagatttgtgtttagtcccagcaatttgggatgctgaggtgggagaatcacctgagcccatgaagtcgaggctgtagtgagctgtgattgtgccgccgcactcctgcttgggcgacagagcgagaccctgtctcaaaaacaaacaaacaacaaaaaagaaaagataaataaacctagattcttattgcacaccatatgcgaaagtaaatttcagatggaataaagatataaatgagcataacaaaactataaaaacgttagaatcaggccaggcatggtggctcatgcctgtaatcccagcactttgggaagccgaggtgggaggatcacctaaggtcaggagttcaagactagcctgaccaacatgacaaaaccccatctctactaaaaatacaaaattagccgggtgtggtgacgggtgcctgtaatcccagctactcgggaggctgaggcaggagaatcgcttgaacccgggagacggaggtggcagtgagccgagatggcgcattgcacaccagcctgggcaacaagagcgaaactccgtctcaaaacaaaacaaaacaaacaaacgaacaaaaacggttagaagaatatttaggactctataaaatcttgggatggggatgtgcttcatttttttttttttttttttttgagacagagtcttgctctgttgcccaggctggagtgcagtggcgccatcttggtctcgatctcttgacttcgtgatgtgcctgcctcggcctcccaaagtgctgggattataggagtgagcccctgcgcctggcctggggatgcgcttcttaaacaaaatagcccagaatctataaagaaaatattattacacaaaaataaaatctttgggatgaaaaaaggcagcataaacacaaataatacagttggtagaaaatatttgcacccataccaccaattgatgaattttctaatatacaaagacctagtattggaagaaaaagttgacaactcagtagaaaaataggcaattgatataaacagacaaaaggcagacgagcaattctgaatggtaaataagtctttttttttttttttttgagacagagtctcactctgtgagcccaggctggagtgcagtggcatgatctcggctcactgcaagctccgcctcccgggtccacaccattctcctgcctcagcctcccgagtagctgggactacaggtgcccgccaccatgcccggctaattttttgtatttttagtagaaacggggtttcaccatgttagccaggatggtctcgatctcctgaccttgtgatccgcctgcctcagcctcccaaagtgctgggattataggcgtgagccaccacgcccagccttctgaatggtaaataagtctaataaaagctacccaggcagcctccccacccctcccgcaatgctcgaccccaggattgccccggcttgcctgcccgccatggccgtcaaggaagcagccttcgatgatggagtggaagacgagtgatcaacgatgagtacaaaatacggaaaaaaaacaccccttttctttaccatttggtgatgacccatgctctggagtggccagcctaactgtccagtggcttccagatgaaatcagaccagaagggaaagatttcagcattcatcgacttgtcctggggacacacacattggatgaacaaaaccatcttgttatagccagtgtgcaacccctaatgataatgcttagtttgacgcgtcacactacgacagtgagaaaggagaatttggaggttttggttcagttagtggaaacattgaaatagaaatcaagatcaaccatgaaggagaagtaaatagggcccgttacatgccgcagaactcttgtatcatcaaaacaaagactccttccagtgatgttcttgtctttgactatacaaaatatccttctaaaccagatccttctggagagtgcaacccagacttgcgtctctgtggacatcagaaggaaggctatgggctttcatggaacccaaatctcagtgggcatttacttagtgcttcagatgaccacactgtctgcctgtgggacatcagtgccattccaaaggagggaaaagtggatgcaaggaccatctttacggggcatacagcagtagtagaagatgttttctggaatctgcttcatgagtctctgtttaggttagttgctgatgatcagaaacttatgatttgggatactcgttcaaaaaatacttccaaaccaagccactcagttgatgcttacactgctgaagtgaactgcctctctttcaatccttatggtgagttcattcttgctacaggatcagctgacaagactgttgccttgtgggatctgagaaatctgaaacttaaggtacattcctttgagtcacataaggatgaaatattccaggttcagtggtcacctcacaatgagactattttggcttccagtggtactgatcatggactgaatgtctgggatttaagtaaaatcacagaggaacaatccccagaagatgcagaagacaggccaccagagttgtttattcatggtggtcacactgccaagatacctgatttctccttgaatcccagtgaaccttggatgatttgttctgtatcagaaaacaacatcatggaagtgtggcaaatggcagagaacatttctaacggtgaagaccctgaagggagtgtggatccagaaggacaagagtcccagacgtatctttacttcttgtgattttagactccccttttttcttctcaatgctgagagtgatttaacactggttttgagacacaaactttgttcagctatccctctatataataggtaccaccaataataccattagccctaacagtgggtgttttctaaatattaatggtggggcttgattcagcaaagccacagacttattacactgaagttttcttcaggaattttctagtaacaaaaccaggtctaaagtagctacagaaacgggaatattatgtgtgattatttttcttcttatgctatatccgcaagtttttcagactcatttaagtaaaggctagagtgagtaaggaacagagccaaatgaggtaggtgtctgagccatgaagtataaatactgaaagatgtcacttttattcaggaaataggggagattcaagtcatatagattcctactcgaaaatcttgatacctgactttccagcatgcacatgaagaccagtagaccaggaaacaggtagacgagtttcctcttggttccttcagttaagtcagaactacacgttcctctttccccatatatttttgcttgttcgtgtatttcttaagctgttttcatgctgtttctttcctttctgtggaatggttttttttttttttttttaacttaggactaccaagttgtaaagatgtatgtttttacctgacagtaataccacaggtagactgtcaagttgagaagagtgaatcaataacttgtatttgttttaaaaattaaattaatccttgataaaagttgcttttttttttttgagatggagtctcgctctgttgcccaggctggagtgcagtggcgcgatctcggctcactgcaacctccgcctgccaggttgatgccattctcctgcctcagcctcccgagtagctgggattacaggcgcccgccactacgcccggctagttttttgtatttttagtagagatggggtttcaccatgctagccgggatggtctcgatctcctgacctcgtgatccacccgtctcaccctcccaaagtgctgggattacaggtgtaagccaccgcgcccagcctttttttttttttttttaggagttagtccttgaccactagtttgatgtttgatgcatctccattttgggtgacctgttttaccagcaggcctgttactctccatgacgaactgtgtaagtgcttaaaatggaataaattgcttttctaccttaaaaaaaaagctacccagtctctttattcatcaggagaaattaaaacaaaaatgaactgcccattagattggcaaaaattagttgataagattcagtgtgggtgagagtgtgggaataggcattcatacagacacacacaaacacacatatatatgcctcttgggtgtatgaattaggggtgggtgtatgaattaggagcatgaattgctacaattttgggggaagaaacatagtaatatctacaaatattaaaattatgtatcctttggccaggggctgtgactcatgcctgtaatcccagcactctgggaggccgcggggcggagggggtggggtgtagattgcttgaggtcaggagtttgagaccagcctggccaacatggtgaaaccctgtctctactttactaaaaatacaaaaattagccaggtgtggtggtgtgcacctgtagtcccagctacttgggaagctgaggcaggagaatcacttgaacccggaggcagaggttgcagtgagctgatatctcgccattgcactccagcctgggtgacagagtgagactccgtctcaaaaaataaataaaaagtcaaaggcatatacattgttctgcaccttactttttcagttaagtatatgtcttaatttttttatttttatttatttatttatttatttatttaattatttttgacacagggtcttgctccgtcacccaggctggagttcagtggtacaatttcagttcactgcagcctctgcctcctgggctgcaatcctcccacctcagcctccagagtagctgggactacaggtgtgcgccaccacacctggctaatttctttgtatgttttgtagagatggggttttgccatgttgcccaggctgggttccaactcctgagctcaagtaatctgcccgccttggcctcccaaagtgtgagaccctgtacatggactgctgatttataaatctgtgagctaataaattggatattgtttcttttttctttttttgagacggagtttggctcttgttgcctaggctggagtgcaatggtgcgatctcagctcactgcaacctccgcctcccgggttcaagcgattctcctgcttcagcctcccaggcgtgcgccatcatgtctgggtaattttgtatttttggtaaagatgcagtttctccatgttggttaggctggtctcgaactcccgacctcaggtgatccacccgccttggcctcccaaagtgctgggattacaggcgtgagccactgcgcccggctggatgttgtttaaggcgctaaatttctgctgctaacacattgcctattatgttagattaaatccaaacttcctacatagtttctgaggctttacaatatctacccttcacgtgtagtatggtcatgtaacctctcccccatatactacctttcaccaacactagctttcctttcaaacatgccaagcttttttttttcttttccatcctagagccttgtattagcttttccctctatttttcctgagattcttgtggctatggctttgaaaaagtattttttatttttatttttatttttttgagacggagtctcggtctgtcgcctaggctggagtgcagtgatatctcggctcactgcaacctctgcctcccgggttcacgcgattctccttcctcagcctcctgagtagctgaaattacaagcacgtgccactacgcctggctaaatttttttttttttgagatggagtttcgagcccaggctggagtacaatggcgtaatctcagctcaccgcaacctctgcctcccgggttcaagtgattctcctgcctcagcctcctgagtagctgggattacaggcatgcgccaccatgcccggctaattttgtatttttagtagacacacggtttctctatgttggtcaggctgatctcaaactcctgaccccaggtgttccgccctcctcggcctcccaaagtgctgggattataggcgtgagccaccatgcccggtcaacgcctggctaatttttgtatttttagtaaagacgaggttttgccatgttggccaggctggtctcaaactcctgacctcaggtgatctgccctcctcagcctcccaaagtactgggattacaggcatgagccaccatgcctggccccagaaatagtaatttttaaaaaattgctttttaagaaaattttatttcaatagtttttggagtacaggtggtttttggttacatggataagttctttagtggtgatttctgagattttggtgcacccataacccaagcagtgtacactgtacccaatatgtagtcttttatctttcacccctgtgttagtcaggggtctctttgttttttttttttttatttttttatttttttgagacggagtctcactctgtcgcccaggctggagtgcagtggtgcgatctcggctcactgcaacctccgcctcccaggttcacgccattctcctgcctcagcctctctgagtagctgggactacaggcgcccgccaccacacccggctaatttttttgtatttttagtagagacggggtttcaccgtggtctcgatctcctgacctcgtgatccgcttgcctcagcatcccaaagtgctgggattacaagcgtgagccaccgcgcccagcgttagggttttctagacggacagaactaatgggaaaaaaatatatatatatttatatatatataaaggggagtttattaagtattcactcacatggtcacaaggtcccacaataggccatctgcaggctgaggagcaaggagagccagtccaagttccaaaactgaagaacttggagttttatgtttgagggtaggatggttccagcacaggagaaacatgtaggctgggaggctaggccagtctttcttttcacatttttctgcctgcttatattctagcctcgccggcagctgattaggttgcgcctgcccagattaagggtggatctgcctttcccagccttcaaatgttaatctcttttggcaacaccctcacaggcacacccaggatcaatactttgtatccttcaatccaatcaagttgacactcaatattgacactcaatattaaatatcaaatataatattgggaaatatcatattgaactctacgttttggtgtgggagaatttattactgagacattggaaaatacactattgcattctttcttctggattgtttaatgtggtttagtttgtgagaatttggtctcattctctactcttgcagtggctgagagttatcttgagaggatactaaggaactgttagaaagttagtattttaccttaaactgtgtttgatcatacagtatggctatataaaagagaaaaaacaagaagaaaagaaaaaagttaccgaagcctaaacattataataaattctaattgtggcagcttccctagtgggagaaagacactttcaaacctcactcggagttcttgggcttctgagcattcttttcagggccagcttcacctcttggttccgcagagtgtagataagggggttgaggaaaggagtgatggccgtggggactagggcagctgccccatccagggggctgttggtttcaggcctcaggtagatgaaggcacagggcacatagtacacggtgaccacggttacatgggctccacaagttgaaaaagcccggcgccgcccatcagctgtgtggattctcaggatggcctgaatgatctgtatgtaggagaggaggatcagggagaagcaactggcaaccaccaccccaatgtctacaaacgtcaccagctcgttgactgttgtgtcagcacaggccagtctcaacactgcagggatgtcacagaagaagtaatccacctgattgggcccacagtagggcaggcggaaggttaggatggcctggagagccccatggatggatcctgccatccaggctccagccacaagcaaggcgctcagcttagcagtcatgagcacagggtagcgcaggggctgacatattgccaggtacctgtcataggccattagggtgtagaggaagcactgggtgctgcccaggaagtgatagaaatagagttgagcaacacagccaccaaatgggatgggtttgacacctaaagtgaagttcatcatgaggcgagggacaatgatggaggagatgctcatatcaatgactgagagaacaccaagaaagatgtacatggggcgggcatggagccttgggtctgcccagacagtgattaaaataagcaggtttcccagctgagtcaggatgtagattagaaaaaagaacacaaaaaagagtgtccttagcctgagtggatacggaattcctgtcaggataaacgcagtcaacagtgtgctgttgattctttccatatcccagagaatcttacctagagaatggacaaaacaagaattaacatagaggtgagaggaaagtgagggggaactagaaagagattgtaaaaactaggggcagtggcagagaagtttctttcttacgtggaaagatgacaagtagggagaaacaatgttctctggcaggtgttttgtaaacaagatcttattggaacacagccttgctcatttacttacatattgtccgtaactgttttggagctactatgacagagatgagtggttgcatttagcttgcaaaacataaactatttactccctggacatttatagaaaaagtttgcaccgagggttttgtacttagagcactttttccaataacctttggaaaataatcattgactgttgtgttagtacaggccaggatttcctggaaacatgatatatgtgagaaagggtatttgtttcattaggtgctctgcccgctcagaatcttccagaggccactggctcactcttatctctgccaggacataaacttacatagagtggggaatatgcagaaaggaaatgcagaaaataagtggctgatttttatgtgtgacagtgcttgatgctgtacagatctactttccaagttctttaccattaaaaggaagagaatgaccatgaagctgtaagtacataaataaagtgaggactatcgccactatgcactgtggttggtacttggtgctatataattcagttgctttgcatgtgatcatttagccttaagacacagtaaagagaggagagaaagaagaaatgagggctggctctagtgagaagtcagagatttaaggaaaattaaaggatgattggagagaatgagaggattgctagaccagaacaaaccactctcagtgtggaagaattattttaagttcttagtccaactccttgattcgcatttcttttttttttttgagacagagttctctctgtcacacagcctggagtgcaatagcatgatctcagctcactgaaacctctgcctctcaggtttaagcaattctcatgcctcagtgtccgggtagctgggattacaggcatatgctaccatgcctggctaatttttgtatttttagtagagacggggtttcaccatgttggccaggctgatcttgaactcctggcctcaagtgatctgcctgccttggtctcccaaagtgttgggattacaggcatgagtcaccacacccagcttacttggcattttttaacctaaagaaaagggttggcgggtaggctcggtggcttatgcctgtaatcctagcactttgagaggccgaggagggtggatcacctgaggtcaggagttcaagactagcctgaacaacatggtgaaaccctgcctctgctaaaaatacaaaaattagccaggcacggtggtgggcacctataatcccagctactcgggaggctgaggcaggagaatcacttgaacccagggggtggaggtgagctgagattgcaccacttcactccagcctgggcaaaagagtgaaactccatctcaaaaaaaaaaaaaaaaaaaaaaaaaaaaaaaaaaaaaaaaggccaggtgtggtggctcacgcctgtaatcccagcactttgggaagccgaggcagatggatcacaaggtcaggaattcgagaccagtctggccaatatggtgaaaccccatctctactaaaaatacaaaaattagccaggtgtggtcgtgggtgcctgtactcccagctacttgggaggctgaggcaggagaattgcttgaacctgagaggcagaggctgcaatgagcagagattgcacggctgtactccagcctgggtgacagagcgagactccatctcaaacaaacaaacaaaaaaaaaaaaaaaaaaaagaaggaaaagggttggaataatgagcttttaaaattccttctagtcctataattttcagatatctaaattcatggcttggaaacttttttgaaaattaactgaccttaaatggatgggttgatttctgggctctgtattctgtcattggttgatgtgtttgtttttatgccagtgccatgctgttttgataactataactttataatatattttaagataagataatatgatgcctgtggctttttctgtgtgtgtgcaagactgctttggctatttggtatctttttgttccacaatggggaaaggacagtctcttcaataaatggtgttgggaaaactggatatccatatgcaaaagaatgaaattggacctttatctcacaccattagcaaaaatcagctcaaaatgaattaaagacttaaacataagacctgaaattgtaaaactactggaagaaaacgggaaaagttctaccacatttgtctgcaaaatgtcatatatattcaacagaatactattcagccctagaaaagaaggaaatcctgtcatttgtgacaatatgaatgaacctggaagacattatattaagcaaaataagccaggcatggaaagacaatattgcatgatctcacttatatgtggaatctaaaaaaaattggacttacaaaagaaaaaaagagaatggtggttactagatgccggggatgggaatgcggatggggaatgcagagatgttgatcaaaaggtacaaagtttcagctgggtgcagtggctcacgcctgtaatcccagcactttgggaggccaaggcaggcagatcacttgaggtcaggagtttgagaccagcctggccaacatggtgaaaccctgtccttgctaaaataaaaaaattagcccagtgtggtggcatgcacctgtaatcccagctactcaggaggtcgaggcggcagaattgcttgaacccaggaggtggaggttgtagtgagctgagattgtgccactgcactccagcctgggtgacagagcaagactctgtctcaaaaaaaaaaaagtacgaagtttcagttagacaggaaaagtgagttttcaggacctattgaacagcatggtgaccatagttaataataatatatatttcagattgctaaaagagcttattttaagtgttcttactacaaaaaaagacaagtatgtgaggcaatggatatgttagtttgatacaatcattctacaatgtatatgcatctatcaaaacatcacatttttaatttaactattatttattgattaaaaataaaagtttaaataaaacaggcttgatgaaaatttttactgaaaaatactcatgacttgaggtaggatgtcaaaaaaattgaaattgattgatttggctgggcgcggtggctgacgcctgtaatcccagcactttgggaggccgaggcaggcggatcacgaggtcaggagatggagaccatcctggctaacacggtgaaaccccgtctctactaaaaatacaaaaaattagtcgggcgtgatggtgggcacctgtagtcccagctactggggaggctgaggcaggagaatggcatgtaccggggaggcggagcttccagtgagcggagattgagccactgtactccagcctgggccacagagcaagactccatctcaaaaaaaaaaaaaaaaaaagaaattgattgatttttttttctctggactgatttccatccactcagaaggaggagagtaagattaacagggaaatgtcaggagctttctgattaatgattctctctaccttcactcctgtgcagggcagcattctgccttgcttgggtcaggggactgtggagagcagggaactggcaactctggtgaagaagtaagtcatcgtagacagatggtcctgctgctggctgagagcaacaaatgtaaacattataatggatctcaatcgttaggttgccatcataatggatctggtcattagttcacttcttggttctgagcgagtctcaaagctcctctgggactgggtgtggtggcttatgcctgtaatcccagcactttggaaggctgaggcagaaggattgcttaagcccaggagtttgagacaaacctgggcaacatagcaagaccctatttctataaaaaaaataaaaaaaatttactgggcgtattggcacgcacctgtgttcccagctacttgggaggctgagatgggaggatttcttgagcccagaaggtcaaggtgaaccactgccctccagcctgggtgatagagtgagagaccctgtcttaaaacaaaaacacaaacaacatacaaaaaagccaactcctctgggtttcaatttcttcactggggctatgaggatgcggaatgagactgtggatccaattttgacaaatagtgaaaaacaagggatagttatattcaagtcttttttgttttattttgttttttgagacagagtcttgctctgtcgcccaggctggagtgcagtggtgcgatctcggctcactgcaacatccgcctcccgggttctcgccattctcccgcctcagcctcctaagtagctgggactacaggcgcccgccaccacacccagctaattttttgtatttttagtagagacagggtttcaccgtgttagccaggatggtctcgatctcctgacctcatgatctgcccgcctcggcctcccaaagtgctgggattacaggcgtgagccactgtgcctggcctcaagtctttttttttttgagatggagtcttgctctgtcacccaggctggagggcaggggcacgatctcagctcactgcaacctctgcctcctgggttcaagcaattctcctgccttagcctcctgagtagctgggattacaggcatgcgccaccatgcccggctaatttttgtatttgtagtagagatggggtttcaccatgttggccaagctggtctcgaacccctgacctcatgatctgctcgcctcggcctcccaaagtactgggattacaggcgtgggccactgccctcggctccatagtctttacattaaacacttagctttaaaactgctgtacccaagctctttcagagcttagctctcatcatttaaccatctctgttatgaaacttaaaaaaaaggcagtaaatcccgccaccccatgccattttatcctctttcaagtcaataaaatgcagtttataaattcttcagttttaaacattatagccacaggatcacagcgatggctgaacttcaaaaagctgaccgcaatcctcttccagatgccagagctacagatgctggcctcctccccgcgttccttgacttcagaaagtacagaggctcaagttcccacacaggttccttgggaaattcatggcagtgcacaatggtagccctgggctgaaggagctcaggtggctgctctggtctgtgtgtcgtgtcatgggatgctatagttttctggggtcactgaggtctgttgttaaagtgtccagatttagaagcctgatttggttaggtctctctgggggaatcaggctgagggaaatcagttcacactattcaagtacctgagagaatgacttaaaaactaaacaaataatttattactttacagtgggagatcttgctcccatgtctgaaatgatgtgtctactgcccagggcacccacgtattaatacttcatggtccctggaaatgaaattaggaatcaaatgtgtaattctgagttttgaatcacagcaaggggaatttcatgaagcacacttaagttaggtcacagtgaactacacctggtaaatcacacagcatctgtatctaagggaatacttcaattttcccttcagatacagttatctttttcccttgggcagtaacgaagatacatcaacaaagttttattctaattattttctccctgaatttctatctttttagattgcctttgttatttccattggctctttttcaacatttttctaactttttagagttccctaattatttttccctgatttatttttcatactgttttcttgtttgctttggagaatattctaagatttactccctaaaaagtgttatttcttttgcaaaattttccattgatagggaatgacagtccacccatagcatgatgattcttgttttattcaaccagagaatagaattttctaactttgtccttagatttcagaaccatcttaaagggaggaatgagaggaaagagtgcagttttatttgtaataccgagtatctttattgggtgtgatttcatcccagttacctctttttgttttcttctttttgtttctctaactttttgctcctcagtaagttataaatattaatagaaaaacttccctttacctctgatctgttaagacctttctccctgtgtcactgccattatcataaacctccaagcataaagcttagtatttgccaggtaaccacccttctgcatactctctggctcattaatatcccacatgtggttctgagacactttatttaaatgctttcaaaaataaaagagagagagagagagacatacggagggacagaaagagacatggagggagagaaagagacatggcacaaggagaaggaaacatggcaccgatgaaacctccggggaccagagtgataaaaagtcatagaataatggtggcattttgcacctgtgtagtgttttttaatccttagaggttaaatggcagaggagtctcacagctgtataatgctggagtaaaggctccaaccagattgtgttgttcctagtccagcactctttccacattttactgaaaattccttcccacaaggaaccaaatcaaaataatgtagtaaatcatgtgaactgaatcacaattttaagagttttatggttcattctgtcaaggattctaaactggtgttactaccctatttcaaaattgagacatagtggagttaagagcaagttctaaaatcaaactagagtgaagtttagttacaatgaattcatgaagttgcccgacttctttcattgacaatctatcacactgagtgtttcttaaaaaagcccgagggaggccgggcgcggtggctcacgcctgtaatcccagcattttgggaggccgaggcgggcagatcacctgaggtcgggtgatcagcctgaccaacgtgaagaaaccccgtctctactaaaaatacaaaattagctgggtgtggtggcgcatgcctgtaatcccagctactcaggaggctgaggcaggagaatcgcttgaacctgggaggctgagattacagtgaactgagagcacaccattgcgttccagtctgggcaacaagagcaaaactccaactcaaaaaaaaagaaaaaagcctgaaggcttagtagtgtttttatttcacagatacttagtctttgaatatattgattaaatgtgtttttgaattctcatctgatatcaaatattaaagaccatctagaggccggtcgcggtggctcatgcctgtaatcctaacactttgggaggccaaggctggtggatcacctgatgtcaggagtttgagaccagtgtggccaacatggtgaaacctcgtctctactaaaaatacaaaaattagctgggcatagtggtatgagcctgtaatcccagctacacaggaggctgaggcaggagagtagcttgaacccggaaggcagaggttgcagtgacttgagatcgtgcgattgcactccagcctgggcaacaagaatgaaactccatctcaaaataaataaataaataataaataaacaaaataaaataaagaccatctagtacatgaatgtttgaaaaatatatgagaaatattaggggaccacaaactaaataaaagtgtataattttgagcaaccaaggagattagacatcttttctaatgaggcgaagggcacaggcttaacctcatttcagcaaatgaattttacttaattctggtcccaaactgtatccctaacccatctttcaaatggccatgaagaaaactttaaaaattttattattttctgaaaatcgactcaaagcacacttttttatttataaaaagcatttcaaatatttggaaaactaatataattaatttctttttaaaataaatttcacaataagacatataaaatggaaaataatttaaagatgaataacaatggaacaaatatatacatatataatatgagaaaagtttgagttattaaattgagagacatgagacaatttctattaaaatgtaaaacccttattagcaatgagttagaattgtctgtttaaaatatttgccaacaaagaaatcaggttatagctttactcatgtccatttttcaaattttgggcagagaacttgtcttataggtggaagggacctggtgaggacaaaaagaacagagcaagggtggcaccaccacagaactcgaagatgctcttcctagtctggttggtattaaaaccagtgaatggacttttaatggagaatagctttggagaaaaatttagccaattaaaggcctgggggaaatagtgttatccaatattagccactattttttaattttttaattttttaattttaatttttatttttgagatggagtctctctctgttgcccaggctggaatgcagttgtgccatcttggctcactgcaacctccatctctcaggttcaagtgattctcctgcctcagcctcccaagtagctgggattacaggcgtgtaccaccacccccagctaatttttgtatttttagtagagatggggttttaccatgttggttaggctggtcttgaactcctgacctcaggtgatccgcccgtcttggcatcccaaagtgctgggattacaggtgtgagccaacatgcttggcctattagccactatttataaaaaggctaaatggtagttacatagtcatatgagcagaacagcaaagaaaatttttgtgacagcagaaaaagaactatactgagtaactaaacaagtaagaatattgagagatgaagtgactcagagtagagaaaccccttacacaatgtttggacttaacatttatctctgaaaaatgggattagaacagtggcaggtgctattttgagaagaggaactcacctgaaggtgtcagcatccatcaaaaactcttcttgcagacggagagaaaggatacaaatctattcctaaggaatcttgaatatctcataggtcagcagcaattattgtgaagagctcgtggcagaagacccaactaattacttttggctggatcaaagtaaagggtcaaactatggaaacttaatttattatttgcctgcttatttgtagagatatctgcttccagcttccttatgaactggaggaggagctgtggctcttactgaagataactgttaaggttggtctctcctgtgttctactacttcttctatttccctcagagtcagtttttatgtgtgagacctttagcttggggaatattgtaatagcactcctgtgataggcaagaccaatatccatagtttgtttcctaggagactctctgggtttctagctttttccaattttgtaacagcaggtgcgacaaagtctgtggggcttaacaggtctcgttgaaatcttcagatctgtggttttctttctgttccaaagcaaatttggaaaaaaagagaagaaaaagctaacatggttgttacttggcaagagatgtgttcttattggtgcattcacattttaagaaattcacactttgaattactaaggtgctaacatagatcttcacagactagaagaaacagaatttcagggttggagggacattagaggtcatctgatccaactatcatctgtaatgttttaagtcaagctccctgaacagtcgtttttcttttttaattttacaattttatttatttatttattttttgagacagggtcttgctctgtcgctcaggctggagtgcagcgacgtgatcacggctcactgcagcctcatcctcctaggctcaagcgattcttccacctcagcctcccaagtggctgggactacaggcacataccaccacacctgactaatttttaaatttttcgtagagacgaggtctcactagattgctcaggctggtcttgaactcctgggctcaagagatcctcctccctctacctcccaaaatgctgggactacaggtgcaagccactgcccccggcctgttatttttcttagtatttcttggtcttgtttccttgaatactttgaatttggtctaacttattttcttctagacttaaatttggtgttgtcgcaacatttttcccaactgtcttcaaatgtccagagatggtctgtgttgtaaaagaacatcttgaatatggtttagttttattattttttccaccaaacttttgtggaggtctctgtagcttccaagccacaattgtgttaaagtgtctaaagcagaggaaagcacactttctctctaaagaggcagataataaatgtttttggccttgaggaccatacagtctctgttgcagctactcaactctgccattgtatgggaaagcacccataaaatactcatacaaatgggcatgggtttttttttttttttgaaacggagtctcactctgttgcccaggctggagtgcagtggtgtgatcacggctcactacaacctttgcctccggagttcaagtgattctcctgcctcagcctcacgagtagttgggatcacaggcacctaccaccatgcccagctaatttttgtacttttagtagaaacagggttttaccatgttggccaggctggactagaactcctgaccccaggcaatctgcccgcctcagcctcccaaagtgctgggattacaggagtgagccacctagcccaaccccggcatggttttatttatttacttaattatatactttacttatagatactataatttgaatgtcataattttcatgtatcatgaaatattattttcattttgcttttttcaacaacttaagaaatgtaagttctagcagggtgcagtggctcatgcctgtaatcccagcactttgggaggcgaaggtggagcccaggagttcaagaacagcatagtgaatatagtgagaccctttctctaccaaaaaaaaaaaaaaaaaaaaattagccagatgtggtagcacatgcctatggtcccggctacttgggcagctgatgtaggaggaccactttagcctgagaggatgaggctgcagtgagtcgtgattgtaccactgtactccagcctgggtgacagagtgagatcgtttgttaaaaaaaaaaaaaaaagtaagttcttaacaggttgtacagaacacacggggcaggccaaatttggcccacaggtgaacagagctgatgtggggaaacacgaagcatgtttgtggctaatcagtgaggagaaatggctgaaagtctgtgtgtgtggcttttgtgcagagccacaacccatactgatccctataacttcaggaattgcagcctaggtttgagatttgaccttccaacaaactgtggactcataattctgattgtgatctgtttcccgggtatagactggtttgcgaataaccaggaattaagttggaaagtaggattgctctgggactgacttgaagagggctgccatgtatcctacaggataaattgcatagaactgtgatggttggcaatcaatcgaactcattataccacgtgtgggtggaagactgctgcaggtgggcaggtgaagccacgcaaatattggtatttctccttgaggtcctgatcttttcttgtattttgctgcttctactactccaggaagcatactttcagcatgaaatgcaatactgtattgagtcatgtacgcagacatcatgtttaaaccaggcagtaatttggaactcaagttttctttcttttttttttttctccttgtgttttcttctgcatgatcctgggagatcgtctccaaatgaaaacattaataaagatgattgtgattactgattgtttagatttgtttttaggtgggaaggaacatagctatattaagattagcttaagtaataaagtctaccatatgtttacatgtggaaagtaaaaaaatacaaactactgaaagccaaattgcctagacaaacaggatctgcagtagagctgggcctcatgaagatggactggtcaggaacagggaatgaatcagaatatagggcagctctggtgactgggatattttgttgtccctatcagaagaagacatcatttggtccaaattgtgtgttgccttgttatggtaactcaataggtctccatctctgcttcttccagtactcctgtgactgacagaccaattttttttttttttttttgagatggagttttgctcttgttgcccaggctggagtgcagtggtgcgatcttagctcactgcaacctccacctcctgggttcaagcgattttcctgcctcagcctcctgagtagctggaattacagacacgtgccaccatgcccagctacttttttgtatttttagtagagatagggtttcatcacgttggccaggctggtttcgatctcccaacctcaggtgatccacccacctcagcctcccaatgtggagggattacaggcgtgagccactgtgcccagccgctttttgtttttttatgtatctctttggtttggttggtcaccttccgtagaatggctcacactgcctcttgtaggggattgtggccattttcatcaaataatttttctgattccacagtcatccatacttggcaatctaagcttatgatccttgttctcaaatttccgacacatcttttttaagactctttatttatgctactactaataatacagtatggatgatgatgtttattattatttgttggatacctcccatgtttaagagctttacaagtgttaatttattcaattcttgttgaggtagatatgaatatccttattttatagaagaggcaactaagttcagagagtttaatttgaatttggcacaaggccatatttccagtagatggaaaagtcaggattcaaatccagtgtattttttttaatacctatgctctttctactccactatatcatgatgtctctctaaaggacataccaggatttaatcagagaatactttgtttaaaggcgtgtatatttaccagataaaacactgggtccctccagtgaagcctttctctagcacccattagcaatatgatgctcaaatatcttttttttcccctgtcccatgtcttgccttgtcttttatttttatttgtttatttatttttgagacagtctcacctgttgcccaggctggagtgcagtggcgcgatctcagcgcactgcaacctccgccttccaggttcaagtgattctcctgcctcagcctctcaagtagctgggattacaggtgcgcaccatcacacctggctaattttgtatttttagtagagatggagtttcactacgctggccaggccggtctcgaactcctgacctcaggtagtctgtgcgcctcggcctcccaaagtgctgggaggtgtaagccaccgcgcccagcctgccttgtctttaatgcaagaaacagaatgcgagtaatcagaaagccctagaaggcatcagttaatacaagatattaatttcttaattccaaaagcacttgcaaagaaaaacttttaagggggaggggagcagggggattgaagcacatcataactggaatcccatgagtgtgccaagtctcatgaggctattttttgaatttatcctttacttgttcatttttttctctcaaataataagtattatttttctttgatatttcccctcaaaggataaaacatatgaaatataaaatataaacgaactcttgtattgtacagttagaagttatagaactatccggctgggtgcggtggctcatgcctgtaatcccagcactttgggaggccaaggcaggtggatcacgaggtcaggagttcaagaccagcctgtccaagatggtgaaaccccgtctctactgaaaatacaaaaaaaaattagctgggcgcggtggcaggtgcctgtaatcccagctactcaggaggctgaggcaggagaattgctggaatctgggtggcagaggttgcatcgcgccactgcaccccagcctgggcaatagagtaagactctgtctcaaaaacaaaacaaaaccaaaaccaaaacaaaacaaaaaaatgaaacaaaaacaaaaacaaaaagaagttatagatctacacactgataaactgcataaaatcttggataactcgtgaatatacaaaatatcagggcacagaaagaagtaaacccactttatttttgtcacacataagattcaaatattcaatctgaagaaaagcaatcatttttgctgtgttctaggttgcatgttgatacatttattaaaatattcctgcataatcacatttggtattactatttcaagtcagatataaaacttcaaaatctgccagccagacaaaatgggtaatcagaaagattatctctgccccacctccctaacctcgataagtataaactcaattttatgacatgactccaaaccctagattgtgatgacaaatgctaggtccgatttctttataatccttttcggggtggcatacttgatagaactcaagcatagaagtctgcattggtcctccaaaccaaattgcatattgctctacgtggtgtgtaatgacttgtacatcaatagcttctggcttcaatctactgctacttaattcctcacttaaggtcagcctgacatctacagttcttttcatatctcattgcaagtgatgtccaaagtccctgaacacagttgaacctccatagacaacaatattcttgttgagaggatgtctcacatcaataggacaattctgaattacttcatctgcaacatctgagatgggatgtataaagtctggattagcaaacctggatgagaaaagatttcaggtcccaagaatctctcatgtccaatatcggtggaaaattatttatttgagatggcattgattcttatacactgtttaaatccactgcgacccatctgcaccttactttttaaattcttttactaaatctgagctaacataactatagtgatcctctactgccttagcagtttccagggattgctctggagggattcctacttcttggtctctcagtagttgctgagtaagatatgttatagctcatcctgcaattggaatgtgtttaatacagctgccaatcacatacccttcaggcgcggaaatgccatgagtgacaccgtttcaacttgtctataacctaccagtcaacatgtattctcctatttgtcttgtggtccaggatgtagctacagcaagaacaacctgcacagcaatgtacaaacctgaacattgaaggacccaaacactatttcaggaatatattccctgctttctggagtattcagcggaggtccagtcaaaagaaaataatggtcttcaggttctgcccttaaatatttaaagatcacttgctctataaagccttccattgagttccaatctttaactagaccatgatggatgggctctttgttgtatatgtagattttccaatgcttcatcgccagtaaagacgtctaggtcatcagcatgtttcatcaccctccttttgaacttgaccacccacttttgttgagttttttttttcatggatgaataatttattggtagaataatacagagtttaccttcaattctatatctgttttgttgagttgttaatggcagtacaggaagggatggtaaacggagattctttattttggacatatcctggttttgtatacctggtaccacagtctgctatgtaggctgtcagctgtcaggtcatctttcctccttttatcctgctgctgctgctgcagcggctgccacttgctccatgctggtaggggccagaaattggcagtgggagatggggcatctgaccatccacagctgagctgccttctctgtggggggtgggtgggatggggatctgtgaaggcaaagcaatagcaagaaagcatcaggctcagtcagcactattcaccacccagcactatccacaacccaggcaggcaggccatacctcccctgtcccactgtggcctcctcatcctctcccttccctcctcgtcactcctgctcccaccctacaacttggtgtccttgtgctgcttttccccaggtagccaagatgcccaggcaccctaaatacctttgaaatggttagagtgtgcatcagttattttcacctagtgtggctcagtttaatcagttccttagtaatgctacttgagatcctgccagtaagatggaagccattttagtatggatgaaaggaaaaagggaaggaaaagaaaagaactggggaagggaggaggtttcacttgaagtaggtttcagaaaggaaattgtatatattatgggaccaggtttgtatgtggcaaccagagtgtgtgtgaggaggtactttatgaagtgggatatgaataggtgcaggtttatatatcattttaaaagttgttcacaccttggtctagtttcatgttgaagctagctgagtccctgctggcagctctgttccacaaaagtcatgctgtattctacaaaaatatgtttattgatgaaatttgtaatgatacatatactcctaaaagagtagttaggttttatggattaaacttacatatgaacccaagatctcacagccttaacagcatctcatttccactgacaagaacaataaggttttccagcttaggtgctatataaaacacatgtcccttaactctggtttctatctaacattattttatttatgtcacaattggcaatttaaacaaaagtagctgctccaaccttaataaattattgtaggtctatgagttgggatttctggcttccaaagggtgacatagaagcaagctggggccgggcgcgatggcttacacctgtaatcccagcactttgggaggccgaggcgggtggatcacaaggtcaggagttcgagaccagcctggccaacatggtgaaaccctgcctctactaaaatacaaaaattagctgggtgtggtggtgcatgcctgtaatcccagctactcaggaggctgaggcaagagaatcgtgtgaacctggaaggtggaggttgcagtgagccagtgagccgagattgtgccattgcactccggcctaggggacagggcaagactgtgtctcaaaaacaaaacaaaacaaaacaaaacaaaacaaaacaaaacaaaacaagcaagctggcttcattcctccccataaaaaaccaaaactcaaacatgagatgagactgttcccagggtcacagagaaatgaaaaaattttgagctgatggtaagataattggacttacatatctgcagtgccccaccccataatctgcccagcaccaagtacacaaaaattttcccttggctcacaatatttacattgaaaaaggtgagattgaggtggacaacctgcttccccaccatcttgggttccctggcaggagacctgttccataagaaacatcacgagtgcctgaaaggagaaatattcctgaggacagccagcgacaaaggcaggaggtgggactaccatccccagccctggaaactgtgctctgtaactgggccaaatcagagtggctgttcaacagcaccatgttgaggtttgttccacaccccctgggtatgtgcccttaaccagccttcccacattactgagatatctcatttaagacttcttcaattcagaataaggggcattctgattgttcactaaggcaaacctggacttaagatgccatttagtactgaaaaggacacagtggcctagtgggaaaaaaaagcaagaaaatcaacaggtaaattataaacaatctctaaacaaacatatctaatgaaaccaaaacaagccagacagagaagactagaataaataactaatccttcagtgaaaagacatagatgtacatccacaagaaacaacagcaatcatggaacatgacctccttaaactcataaaacaaggaaccagtgactaaccctaataagatggcaatatgtgaactctctggctaagaattcaaaataacagctttaaagaaactcagtccaatacagaaaaggacctcagaaacttatcagagaaatttaacaaagagattaaaataataaaaaaagaaacatatattaaaactgagaaatatttttttttaaactgaaaaattcattagagactgtcaacagtggaatggatcaagcagaagaaagcatcagtgacctttaaggcaggttatttgcaaaaacatagaggagaaaaaggagcaaaatgaaaaggaagaaagatcacccacaagatacagaaagttagttaaaaagaccaaatcttagaattattggtgttcaagagggagttgagcaagggcaaagagtagaaagcttgttcaaagaactagtaacagaaaacattccaaaacttgagaaagagataaatatccaggtatggcaaggtcagagaacaccatgttaaatacagtgagttctaaatttctcttcaaagaatcagtatatcagtatgttcagttcttcgttctccattttgaagtttaacttcctcattctccttgtctgcttgcccgaagtttcagtaaacaacctttcccagcagttctaatcagtagttcacatctattcccctggttacctgctctgtcctgagtcacccctggtcacctgctctgacctgagtcacccctggtcaccggcttgatctgagtcacctttaatcacctgttcctaactatccttcccaccaaactactcaccctgccaccctggctcgtacccctgctctttaaaacagccaatcagaattagcttagactgtgtggtccaaccctatccaataggggaatgacccagcagtaggggctacctgcatcagggataagaaccccttcccctcccttgttcaggtgtgctctcgccattgctccatccatgagatgcacccttctacagaagtaaaattgccttgctgagaaaatttatgttggagtgctatttcttttgtggcaccaaaaatttatttccaacaaccaaacagatttgaatcaaataagatcaccccaaggcatataataatcaaactctcaaaggtcaaggacaaaaagaatatcctaaaagcatcaagagaaaagaagcaaataacatataaaagaactctgattcatctggtgacaaagttctcaacagaaaccatataggccaggagggaaagggacaacattttcaacatgctgaaagaaaaaaaaaacctgccatctgagaatactgtattcagcaaagctacccttcaaatatgaagatgagataaagctttccccagacaacaaaagatgagagaatgcatcaccatgaggcccacaagaaatgccaaagggaattcttcaatttgaaagaaaaaaagaagcactaatgtgcaaaaagaaaacattagaggccagatgtggtggctcatgcctgtaatcccagcactttgggaggccaaggtgggcagattacctgaggtcgggagtttgagaccagcctggccaacatggagaagacctgtctctactaaaaacaatataaaattagctgggcatggtggtgtatgcctgtaatcccagctactcaggaggctgaggcaggagaatcacttgaccccagaaggtggaggttgcagtaagctgagattgtgccattgcactccagcgtgggcaacaagagcaaaactctgtctcaaaaagaaaaaaaggaaaaaaaggaaaacattcgaaagtatcaaacccattagtaaaataaagtacatggacacacctagaatactctaatactgtaattgtagtgtgtaatatactcataactctagtatgaggcccaaaaggctatctattaaaaacaataatagctgccaggcatggtggctgacgcctgtaatcccagcactgtggaaagtcaagatgggtggatcacctgaggtcaggaatttgagatcagcctggccagcatggtgaaaccccatctctaataaaaatacaaaaattagccagatgtgggggcgtgcacctgtactcccagctactttgggaggctgaggcaggagaatcgcttgaatccgagaggcaaagctttcagtgagcagagattgcaccagtgcactccagcctgggcgaccgaatcagactccatctcaaaaagcaaacaaacaaaacaaaacaaaaaaacaataatagccgcagcaacctgttaggaggtacgcaatataaaaatgtttttttttctttttctttttctttttttttttcgagatggagtcttgctctgtcaccaggctggagtgcagtggcaccatcttggctcactgcatcctccgtctcctgggttcaagtgattctcctgcctcagacttccgagtagctgggaatacagacatgcgctgccacgcccaactgatttttgtatttttagtagagatggggtttcaccatgttggccaggctggtatcgaactcctgatctcaagtggtccacccaccttggcctcccaaagtgttggaattacaggcgtgagccaccacattcagcaaaaatatgtaaattgagacaacataaaatcaaaatatggggggatggagttgaagtacagagtttctgttttcatatttctttatttcttttttttaaatttttaaaagtttttttactttttttttttttagacagagtctcgctctgttgtacaggctggagtgcagtggcacgatctcagctcactgcaacctccgcctcccgggttcaagcagttccctgcctcagcctccggagtagctgggattacaggctcccaccaccacgcctggttaatttttgtatttttaatagagacagggtttcaccatattgttcaggctggtcttgaactccagacctcgtgatccacccactttggtctcccaaagtgctgggattacaggtgtgagccaccgcgcccgacgtcatttttctttatttctgttctattcatgatgtaagatacattgtcacctccttaaaataacttgttatatctatattttttgtaagcctcatggtaaccactatgtaaaaacgtataatagattcattaagaataaaaagcaatgatttaaaacatactgccagagaaaataaatcaaaggaggacagtaagaaaggaagaagagaagagttataaaacaaccaaaaaaacgagcaacaaaatggcagtagtaagtttttacatatcaatagcactaaatgtaaacaaactcaattcttcaattaaaaggcataaagtggcttaataaacaaagaaataagacccaacttataaagacacacatagaatgaatgtgaaggggtggaaaaagatattccatgcaactagaaaaaaaaaggggaggagtagctatatttatgtcagataaagtagactacaactcaaaaactataaaaagatacactatataaatacactacaaatcaaaaactgcaaaaagagacaccataactgtaaaaaggtcactatataatgattaaggggtcaattcagaaagaggatataacaattataaatatctatgcatccaatgtgataattcccaagtatataaacaaacattaataaatttgaagcaagagagagacagcaatacaataatagcagaggacttcagcaccacgctgtcagcaatggacagatcatccagtcagaaaatcaacaaagaaacatcagagttaagctacacactggaccgaatatgtctaactgacatttatagaacatttcactcaactgctgcaggatgtacatttttgtttgcgttagcacatggaacattctccagaatagaccatatcttaggccacaaaacaagtcttaacaagttcaaaaaagtagaaattatatcgagtatcacattgatcaagtaccacattgatcgagtatcacattgatcaagtaccacattgatcaagtatcacattggtcagaaaagaagtcaataataagagaaatcttgaaaaatacacaaacacatggaaattaaacaataagctcctgaacgaccagtgggtcagtgaaaaaattaagaagttaaaaaatttcttgaaacgaatgaaaatagaaatacagaatccccaaatctatgggatacaggacaagaagaactaagagggaagtttgcagcaataaatgcctttatcaaaaaggtagaatgtcttcaaatacgctgggggtggtgactcttgcctgtaatcctagcactttgggaggccaaggcaggagtattacttgaggtcaggagttcaataccagcctgggcaacatagcgagaccccatctctacaaaaaataaagaatattgtctgggcataatggcatgcacttgtagtcttagctacccaagaggctgaggtgataggatggcttgagcccacaagatcaaggctgcagtgagctgtgattgtgccactgcactctagcatgggtgacagagtgagaccctgtttcaaaaaagaaaagaaaacaagatttcaaataaacaacctaatgatgcacctcaaggaactagaaaagcaagaataaccaaaacctaaaattaatataggaagaaaaaatataaaagcagaattaaatgggattgagatgaagaaaacaaggctaggtatggtggcttatgcttataatcccagtgctaggaggctgaggtgggaggattctgtgaggccagaatttgaaaccaccctccacaacataattagactcctgtctctacaaaaaataaaataaaaatattagccaggcatggggcaatgcacctgtaattctagctacttgggaaactgacacaggaggatcccttgagcccaggagtttgaagttacagtgggctgtgattgtgccactgtactccaacctgggtgacaaagtaaaaccctgtctctaaaaagaaaaaaatccgggcgcggtggctcacacccgtaatcccagcactttgggaagcagaggcaggcggatcatgaggtcaggagatcgagaccatccaggctaacacagtgaaaccctgtctctactaaaaatacaaaaaattagcagggcatggtggcgggcgcctgtagtcccagctactcgggaggctgaggcaggagaatggcatgaacccgggtggcagagcttgcagtgagccgagattgtgccactgcactccagcctgggcgacagagtgagactccgtctcaaaaaaaagaaaaaaaaaaagaaaaaaaagaaaaaaatgaaaaacaacaacacagatgatcaacaaaataaaagtttgtttttttgaaaacataaacaaaattaacaaacctttagctagaccaactaagaaaaaaaaggagagaaaacccaagtaaataaaatcagaaatgaaaaaggagatgtaacaactgagaccacagaactacaaagtatcattaaagactattatgaataattatatgcagacaaattggaaaagctagaagaaatggaaacattcctgcacacatacaacgtaccaagattgaaccatgaagaaagaaaacctcagaccaggagtgatggctcatgcctgtgatcccagcgctttgggaggctgaggcaagcggatcacctgaggtcaggagttcgagaccatcctggccaacatggtgaaaccccacctttactaaaaatacaaaaattagctgggcatggtggtgcgtgcctgtaatcccagctattcaggaggctgaggcaagagaatctcttatctcttgaactcgggaggcagaggttgcagtgagccaagatcacgccattgcactccagcctaggtgacaagagcgaaactctgtctcaaaaaaaaaaaaaaaaaaaaaaaagaaatagaaaaccccaacaaagcaatgacaagtgatgagattgaaaccataataaaaagtttatcatcagagaaaagtccaggatctgatgcttcactgctgaattctaccaaacatttaaagaagaactaataccacctgtactcaaactcttcaaaaaaatttaagaggaagaaatatttcccaactaattttttttttgaggtggaatcttttgctctgtcacctaggctggagtgcagtggtgccatattggctcactgcaacctctacctctcaggttcaagtgattctcctgtctcagcctcctgagtagctgggactagaggcatgcaccaccataccgggataatttttgtatttttagtagaggcagggtttcaccattttggtcaggctggtctcgaactcctgacctcaagtgatgcacccaccttggcctcccaaagtgctaggatcacaggtgtgagccactgtgtccggcccccaactcattttacaatgccagcattaacctgataccaaaaccagataaagatacaacaaatgaagaaaactataggctaatattactgaaggacatagatgcaaaaattaattaaagagatcattcatcatgagcaagtgggattcatctagggatgcaagaatggttcaaaatacacaaattaggctgggtgcggtggctcacgcctgtaatcccaaccctttgggaggccaagggtgggtggatcacttgaggtcaggagtttgagaccagcctggccaccatggtgaaaccttatctctactaagaatacaaaaattagctaggtgtggcggcacacacctgtaatcccagctacttaggaggctgaggcaggagaatcacttgatcccaggaggcggaggttgcagtgagctgagatcgcaccactgcaccccagcctgtgtgacagagggagaatctgtctcaaaaaaacaaaacaaaacaaaacaaaaaaacaaaaactaaaagacacgaaaacccaaaaacaattccctcacaaatcaataaatgcgatgtatgccattagcagaaccaaaaccagcatccatatgatcacttcaatagatgctaaaaaaattagataaaatttaacatcactctatgataaaaaccctcaactaactaggtatagaaaaaagataccttaaaataataaaggccgtatatgacaaacccacagtcaacaacctactgaatggggaaagattgaaagtctttcctctaagatctggaacaagataaggacaaccattttcaccacttttattcagtgtaatactggaagtcctggctggaacaattaggcaagagagagaaataaagagcatccaaattggaaagaaagagggcaaattagccttgttcgcagatgacatgatcttgtacttagaaaaatctgaagattccaccaaaaactgttagaacggataaacaaattcagaaaagttgcaggatacaaaatcaacatgcaaaaattagtagcacttatttacaccaatagtgaacaatctgaaaaagacatcaagaaagcaatcccatttatggtagctacaaataatataaaatacttaggaattaatttaaccaaagaaatgaaagatctacacaaggaaaactataaaacactgatgaaagaaattgaagaggacacaaaaatggaaagatgttccatgctcatggatcagaagaattaattttttttttttttgagatggagtttcactcttgttgcccaggctggagtgcaatggtgcgatctcggctcactgcaacctctgcttctcgggttcaagcgattctcctgcctcagcctcccgagtagctgggattacaggtgcgcaccaccacgcctggctaattttttgtatttttagtagagacagcgtttcactatggccaggctggtcttgaacttctgacctcaggtgatccgactgccttggccttccagagtgctgggattacaggggtgagccactgcaccaggccaagaattaatactttttaaaatgtcaatattacccaaagcaatgtacagatatcatacaatatctatcaaaatatcaatgacattcttcacagaaatagaaaaacaactctaaaattaatatggaaccacaaaagaccctgaatagccaaagtaatcctgaggaaacagagcaaaggtggaggtatcacaccaccagacttcaaagcatactacaaagctataataaccaaatcatagtgttggcataaaaacagacatatagatcagtggaacataataaggaactcagatatcaatccaagcatacagccaagtcactttcaacaaaggcaccaagaacatatgatgggaaaaggatagtcctttaataaatggtgctgggaaaactagataaccaaatgcaggagaatgaagctggatcactatctctcaccacgtacaaaaatcaaataaaaatggacaaaagacttaaatgtaagatctgaaactatgaaactcctacaagaagttattgagtgatgctccaggacattgatctggacacagactttttgtgtaggacttcaataatacaggcaaccggagcaaaaatgcacaaatgggatggtagcagttgaaaagcttctggatagcaaagggaacaataaacaaagtgaagagacaattcacagaatgggagaaaatatttgcaatctatccatctgaaaacgggtaaataatcagaatacatagggagctcaaacaactcaataacaaaaaaccccatataatccaattaaaaagtgggcaaaagatctgaatggatattttccaaaagaagacacacaaatggccaatagttatataaaaaatgtgcaacaactttaatcttcagaaaaatgcaaaccaaaactacaacgaaatatcatctcaccctagttacaatgcttttatcaaaaagacagggagtaatgaatattggcaagaatgtggagagagggaaacccttgtacattgttagtgagaaggtaaattggtagaagcattatggaaaactgcatggaggttcctcaaaaaactaaaaaaagaattctcatatgatccagcagttccactaattggatatatacccaaaagaaaggaaatcaatatattgaagtaatatctacactcccatgtttgttgtagcactatttataatagccaaaatatggaatcaacctaagtgctcatcaatagatgaatgggtaatgaaaatgtggcatatatacacaacaacataatattcagcctcccccccgccccccacacaaatcctgtcatttgcagcatggatggaactggaggccattatgttaagtgaaataagccaagcacagaaagacaaatattgcatgttctcactcatatgtgggagctgaaaaagtggatcccataaatatagggagtggattggtggaaggcaagaagtaggtggggatgaagagaggttgattaatgggtacaaatatactatttggtagacaaagtaacacctaatgtttgatagattagtagtgtgactatagtttatcataaactattgtatatttcaaagtcactataaaataataattcaaatgtttctggcataaagaaaatacaaacatttaagttgatggacatctcaattacactgatttgatatttacaaattatgtgaatgtattaaactaccacatgaaccctgaaaaaaaatatatctattatgtattggtgaaaaatattggctttgagaaaaaataaattactgtagactcagaagttgtcttaaatggcttctcttataggagaagatatagatatatcttgtaatctcaccgtaacagttttttctcataaataattttttttcttttaagacagggtctctctgttgcccaggctggagtgtagtgacacgattatgtttcacggaagccttcaccttctaggctcaagtgattctcctgcctcggcctctcaagctgcagggactacaggtgtacaccactatgtctggctattttttttttttttttgagagggggtctcactctgtcacccaggctggagtgcagtggtgcaatctctgctcactgcaagctccacctccagggttcacgccattctcctgcctcagcctcccaagtaactgggactagaggcacctgccaccatgcctggctaattattttttttgtatttttagtagagacagggtttcactgtgttagccaggatggtttcgatctactgaccttgtgatccacccacctcggcctcccaaagtgctgggattacaggcgtgagccactgcacccggcctattttattttattttactttttaattagtagagatgaggtcttgctatattgtccaggctggtcataaaggcatttaacaaaattgatgttcatatttattccagttgtctcagagatatatacatatatatatatatatatatatatttttttttttttttttttttttttttttttttttttctgagtctttgacttgatctattatttaaaattaggccaacatgatctctcacatacagatgaataaaaaactgttggcaaatgaaataacacatttaccttgtccttcatttttctggaaggagcgattgaccctgctcttatattgttccatacttgagtcttctgaaatgttttctttttcctccaggtaagaccaggataggtcacagaggaaaacacaagggttatttacatccgcctggcctggtcagaagacattgcatgatttactcagtgacctactgaatgactgaccagctggcttctagatctttgtctacttggcttgtgataactaaccaaaagtttttctggatgctttggacaatttagatgcagttcaaaagactttcctggtgctgtttttgtttgtttgtttgttcatattctagagatgggatcttgcttggttgcctaggctggtcctgaattcctggcctcaagctctcctcccagcctcaagtagttgggattacagacatgagccaccgtgctcagccctggtgctgttttaatttaaaaaattgttgattgggtaaagtattaggatgaggtaacaaagtaactcgacaataaatcagtggattaaaaactgctctaacaaagtaacccaacaataaatcactggattaaagaagctaaagttttatttccctctaacttaaaattctgaggtgagtgatccaggttggtaggtaactcttctctacttgctcagaagttgctccttgtgggtccccatcatgtgccttttccagcttagagcagaaaaagaatgtggaaaaattcatgtgccagttttttttttttttttttttgagatggagtcttgttctgttgcccaggctggagagcagtggcatgatcttggctcactgcaacttctgcctccagggttcaaacgattctcttgcctcagcctcccgagtagctgggattacaggcatgcgccacgacgcccggctaattttcatatttttagtagagatggggtttcaccattttggccaggctggtcttgaactcccgacctctggtgatccacctgccttgaccttccaaagtgctgggattacagatgtgagccactgtgcctggtcatgtgccagttttgagggccttatgtgtatatgtaagtggaagtatctcacatgtacagccttctcatattcaatttgggaaaacttagatatatgactagatctggctgcaacagacactgagaaatatccacagaagagcagccacattctagctacagccttctaactagggaaggagagaatggatttttgtggacacccagccatctcctctataagtggatactagtagatattggggaaaaggaggctacaacataaacatcaataaaacatactttcctggccgagcacggtggctcacacctgtaatcccagcgctttgagatgcaaagtgataaacagagcaagactccatctcaaagaaaaaaaaaatgctttcctttctctagaaactccaatctaagctataatatagtccagccaaagaaaagtactattataaaatttgaaggcccactggaatacaaggaggaggatataacttatgagtggaagaataagaaaacttcttgtaggaataaagatttttcttggacctcaaagttagcataaaacatcagtttaccaatatggaggaggaaggctatttcagatatgagaataactcaagcaaaggctcagaggcggggaagtataatgtttaaggaatgacaggtaaattaatggggccggaagagaaaagggaggtagagatatgttgggagatgaggtatgttggtaccagattgtggggaactttgaattccaagctaataggtatgggctttatttatatgcagtggaaagccagtaaatatttatagggacaggaaataaaatatttagttgtatgtttcagaaagaaaactccggtagttgtatggaggaaagtggaggtgacaaggagaccacttaagaagccagagagacatttctgaggcagggtgaacaggatttgatgaattactacatggagaaaagtgaggggctgaaaggaaacacagatgagccacacagagattctaactaagtacctggaaggatggatttgccttgatgtgagcaaagcaattctgaatgcctagaggcttgggaagttaggagcaaagcaaatgaatgtaggacagtattatgttggctttccccaaatttgcttggaataatttcccctccttctagaagaaagcatcaatttctcagagtcaacatatgtgctttctcttgagagctgggtcagaaaagggtaaaacagctatggataatttcttgaggttgaatatagcaccagaagcctctttctagtagaattatgttcatttctgctgaaactaacatctatttattgaacatttgtcacgtgcagcagtagctgaagagagtggtagcgatggttatgtggctgtagttacttattttcccacccaagtaataaccaggcccgaccctgcttaggttctgagatcagacgagatcgggcgtgttcagggtggtatggccgtagatagttacttattttcattcagtcccttgacctgctgttatcctcttcagggcagacttcacttcctggttcctcagtgtatagatgagggggttcagtaatggagtgacaacagtgtaaaacacagccgctgccccatccagggggcctttggagccagccctaaggtagatgaaaatacaggggacatagtagactgtgaccacgattaggtgggagccacaggtggagaaggcccggcgcctcccatcagtggtgcgtatcttcaggatggcatttactatgttggcatacgagagcagaattaacatgaagcaactggcggccactaccccgatgtccacaaaggtcacaagctcattgacagttgtgtcagcacaggccagtctcaatactgcggggatgtcacagataaagtaatctacctgattgggcccacagtagggcaggcggaaggtcagggtggcctggatagacccatgcatggagccggcgacccaagctccagccacaaggactgtgcataacctcccattcatgagcactgggtagcgcaggggctgacatattgccaggtacctgtcataggccatcaaggtgtagaggaagcactgggtgctgcccaggaagtgaaagaaatacagttgagccacacagccaccaaacgggatagccttgttggcaggagtgaagtttaaaataattcaaggaacgatgactgaggagagccacatgtccaggaatgagagcactcccagaagaatgtacatggggcgagcacggagcttcgggtcagcccacacggtgagcagaatgagcaggttccccagctgagtgaggatgtaaatgacgaagaagaccaggaagaggaggcttcttatattcggggggtgagacaaacccagaagaatgaaatctctcaccacagtgtccagcgatgtgtttttggtctttcccatgtctttttgcagtctgctaagatgaatggtgaagtctgataaggaaaatgcaggtgtggagtgataacagaatgcttttgtctaatgatcagaatttgagaggtaaacagaagtcttctatattttaagtagaaagcatttgccatcagtcacctgggtttgcttggcaaaacaaccttcagagctgtttagtctctaggtgccctgaaatgcctctttaataggagatacgacatacaggtattagaaaccaagcacaggattgtgtctgaataatagtgtaagtgcatatgataggtctacgcccccaaaggggaccacagagaaatagattttggtgatatgaagcagtgtggaactattaccccacaattatcattcctattgttggtttatgacttaatatccttgaaatgtctcctcctgagatctacaagaaactttgtgatctggttcttgcatatttcaataatctttgttttagttctctcagatcaccataccctccttcctctggacttaggagtatgctgattgatctaatatgtcttcattcctctgtcacctccttggaaagaattatcctccactagaagacaattttctgggaaataagaacttatattaaagggtgattacagtacattattataagagctatttgcttaagtacttaccgtttccttctactagattttaagatccttcagagcaaagagcactctattttgttctttgatgtatttgcagcaactactctggtgcttggcaataataagttaataaatatttgttggttgactggctaagtggatagtgtcaactcctactaatcctgtatcatgtttccctccatgatcacatctctcatgctttttccatatagtcaagactgtaggacagggcctgcacttcaagcaatgtgagcctatgctcagtgtaaacaaagtctaaggtaccatttgtaccttctgtttgctctggaatgttatttacatttattaattgacctaagtagtttagtagttttgttcatttggatgataacagcattgattattattattattattatttattttttgagatgaagtttcgctcctgttgcccaggctggagtgcaatggcgcaatctcagctcactgcaacctccacctcccacgttcaagcaattctcctgcctcagcctcccgagtagctgggattacaggcatgtgccacgatgcccggctaatttttgtatttttagtagaagcggggtttctccatgttggttaggctggtcttgaactccccacctcaggtgatccacctgcctcagcctcccagagtactgggattacaggcatgagccactgagcccggccacagcattgattattataggatttgtcttttagtacattgttattttaatagtttttgtttgtcttccaacaaaaaggatttcaaaaagccttcaaaggtattaaacatctaagccagatgttatttaaaaactccctttggctgggcgcagtggctcacacctgtaatcccagcactgttggaggctgaggcaggcgaatcacttgaggccaggagttcaagaccagccctggccaacatggcaaaaccttgtctctattaaaaatacaaaaattagcccggtatggtggtgcatgtctgtaatcccagctactcaggaggctgaagcacgagaatcgagactcacctgagcctgaaaggtggaggttgcagtgagccaagatcaggccactgcactccagcctgggccacagagagagactaggtcttgaaacaaaacaaaacagaaaaactctctttgataaatggtttgttcaaaaaagaatgttttaggtatttttacccattgcttaaactaaaatatcttacagttcttttttgttgttgtttgttgtttttttaaaataaattttattatatatattcaaagtatgcaacatggtgttatgaaatatatagatagtaaaatgattactacagtgaagtaagttaacatattcatcatctcacgtagttacccattttattgggtggcaagagcagctaaaatttagtcatttagcaaaaaatcctaaatatacaatattattaactatagtcctcatgttgtacattagagctttagacttgttcattctgtgtacttgctactttgtgtcctttaagaaacaaaaattaaactagtaagaaattaattatacaaagatctgagcattaacagttataaccacagggatgccattagaaaaattcccttttataaatgtcagactcaaacatattttatcttcattattatttaaaaggaattaagtgcatataattattaataatactgcatttgtactaattattaataataatgcatttatactaattatacagtccatagaaataagtacagactttgtccacaaatctctttattagagtatattagatttttattaccttattttcagaaggaaggataatttcttttgggatgggtggatggtactttctttgtctagaatggaaagaaatggcaaagtttgagcacttgtatatgatactaattatgagcaaaatttatattctaccagtgagaggagatacatactagaggagatatatactataaatgtgagtctactttagacaaataatttttttttttaaatggagtctccctctgtcccccaggctggagtgcagtggcaccatctcagctcactgcaacctctgcctcctgggttcaagtgattctcctgcctcagcctccccagtagctgggactacaagcaggtgccaccacacctggctaatttttgtatttttagtagagatggggtttcaccatattggccaggctggttttgaattcctgtccttaagtgatccacccgcctcagcctcccaaagtgctgggattacaggtgtgaaccaccgtgcctggccaaataatgtatttttgaaaactttttataaaaatcaaaatttcacaaattaaatcatattagaattatactaaaatgtcaaccatttggatgttcatacataacgaacataataaatccttatgcataatgaaaaatgttatctttcttcggccaggcacggtggctcacgcctgtaatcccagcactttgaaggctgaggtgggcggatcacgaggtcaggagatcgataccaccctggctaacatggtgaaaacccatctctactaaaaaaaaaaaaaaaaaaaaaaattagctgggcatggtggtgtgtgcctgtagtcccagctacttgggaggctgaggcaggagaatctctttaacgtgggaggtggaggttgcagtgagccgagatcgtgccactgcactgcagcttgggcaacagagagagactctgtctcaggaaaaaaaaaaaaaggaaaatgttatctttcttcaccaatctgagtttttccctggctgtggtgcataaatatgggtacactttcccaaatcctctgctgagagaaggttccttctaccctcaccctgctttcctatctggccctgggcatcctggttggcaggacagggactctggtggtgctcacagtaggtgagtataagggcaaggctccttttccaggcagaggcagcagaagatggtgattttgatgtggtgtaatggggttgcagaggaaggcagactgtgggaaggtgggtagaggagaatttcagaaggaggaatctctgtagggcagggagcatgtttgcagaaggaccaagtcattctaagagagagagtgtggttttagaagagagaagtcttttttttttttttgttctggagaaaaatgggccagcctagaaaaatacaaaagaagaaaactgatcaaatgttttccttcctaacgtaaatgtgatattttattatgagcctactaatcttttgaagctgtagagtcttaggcttcttatattgaggagtgaaggaaactcagatgtatcaattaaaaaaaagttgaagtatctacatcttggctaatttgttacatattctaaaatttcttattttaaatagtatttagtattgttaaggtcatcttattaaatggttgtaatttaatatcaaaatatatgattaaagaaaataagaatctaccactgatagattcagcatttaaaacagcaaataattaggggcaggggctttggtccagaaattcaagggagggggtcctagggatggaatgaaggaggttagcattgagagagcatggtaaggaagggatgagatagggttaggtaggaaaccataggatgggctaagtattgtgctcttctttactaggaggccaattcatgttgaacgctttgcaggcagtagcatttttcactttgtaaaaagtcagattatcccagagaaaaattggtttctttctggcatgtctgcaccgaactggggttcctacagggcacttttgagttggtgccatccccatttagagcagatgtgaatcgctgaggctgagagatgaggactgacccagcgttgagttgttcactcttgtttgcttttagggccagacttgaccacagcccttttaggccattaggcagcctgagcaaagagttgaagcaaggagaatgaatagagtttgggtacagtggggaggcagagctcatattttcttgctctgattattctgccagtgttcttgtattcttagttaaaacaaaaagagcttacttaagaaaagatacttgaaacaaagaccttccaattttcaagtaggttgaactaagtgtgttctgggaaacacaggtttaaataatccatctcttactgtgtttacacagtaacacttaatctgatacatcatctatattgtttatcatctctcccaaaagagagaaaataaacgatagctctttaaaattattttcctcaattcaaagaagaatgttctttaattgggagaaacaataatttaattcaaaacttatctgcctaccaaattaactctgggtgtagagggtgagttgagaaagaagatgggggaaagagacagattaaataccgtttttgacaaaattgtgaaaatgtttaaagtctgggaattaagtatttgttccattttgaattgccccagccttaggaatgctcttcttcttggactcacatggacacagcagcaaaatcttggggaaagttggtgtattctcaggtggaatgtggagcaggtaaggaaagcatccttcagaacatcgctttggcttgtggtgatggattactgaatctctgttttgtaatggaattaaaatcttccaagggatcagcttattgactgatttaagaattgatgagacttggttatttatggagtgtggctcttctacttatgatcttgaattgattacccttattagctggctctcctttgatccagtttttaaaaacactgtcaagagatttgaagaaaactatccacctccttggaatcctaccttgaaacatttcccagatgagaactacattcccaagatccttgttattttttgttttgacagcaagcaggaatcatttctgcatatctagaaagtgagctgtgaagaacaacatgagctgtttgaatgacctcaaatttcagtgatttctttatttaagttgttgtgagggtcacacatttacccacattatactcagaagtgaattgataatgtactgaatttttaagagtgtctccgtttaaaaaaatgaaaaaagaaaaaaagaaaatgtatcgaatttttaataattaagctaatctttcttacatattcccacttctctggacactgagagaaaaaaaaaatcccctaaatgtaggtcaattgactaaatttggttacttccagtttataaaatattgggttgggcagcaatggctcacacctgtaattccagctattcaggaggctgagttgggagaatcatttgagcccaggaatttgagaccagcctgagcaacatgacaagaccctgtctcacaaacaaacaaacgccaaacaaatttgccagagattctaaaaagtcttggatgactccattgtttctataacagtggggaaaaagatggcttcagattgttggagcattccttagatacttcttcttgttttggaaattattttaattaaaaaaaaaaaaaagcccgggcatggtggctcatgcctataatcccagcactttgggaggccaaggcaggtggatcacctgaggtcaggagttcgagaccagcctggccaacatggtgaaacctcatctctactaaaaatacaaaaattagccaggcatggtggcgagtgcctgtaaccccagctacttgggaggcggaggtaggagaattgcttgaacctggtaggcggaggttgcagtgagccaagatcgcgccattgcactccagcctgggtgacagagcaagtctctgtctcaaaaaaaaaaaaaaaaaaaatggagacagcgtctagctctgttgcccaggctgctctcaaactcctggcctcaagcagtcctcccacctcagcctccccaaatgttgggattacagatgcaagccaccgtgctcagcctgacttttgttcttttttgctggggtgtggcaggtaggtctggtagacttcttgaatcatataggtaaggatagtgatgcctagacatttggggtgcttgctcttatccatagttggaatcaatcgtgtgctggagttggtttgtactggcttgcaatagctgattgttaaaatttcagaaattttgtgagctctttgctaaacctgcaattaaaatacacatttttaggcctagcacggtggctcatgtctgcaatcgcagctctttgggagtctgaggtggaaggatcgcttgagcacagaaattagagaccagcctggccaaaatatcaagaccttttctctacaaaaattaaaaaattaaccagttgtggtgacgcgtgcctgtagtcccagctacatgggagattggggcaggaggatcctttgagcccaggaaattgaggctgcagtgagccatgttcatgccattgcactcagcctgagtgacaaagcaagaccctgtttcaaaaaaaaaaaaaaaaaaaatatatatatatatatataacttatataaatttgtacttaatagacattttcacttaaataaattatatcaaatacaatactaaaaactcatcatttcctgagtattttactgtgttttactaatatctatgagatcgttcacatctatcatatctttatggtagaaataccataaaatagtgtgctactacacatctcttactaaactcataagtagtgatgtcatgttggagcttgaaattgactatagtgggatgatttacaccataaaaatgggcaaatactacctatcagggtttttttttgttctgatagtgagtttttaaatatttaacagcatactcatggctggaatctctagctcctgttcttcctggaagtcattgcatgctgtagcaactttgctttgactctagccttgtgctgttacactattgttctgcatgcttctctatcttccctggcaaaacatacaggcatctttgatttccttatttccaggcactggaaaactagattcgtatagtcatgtccccttatacaatgagccagagttgttttaaggatctgcagcctctctgtgtcatgcccacagaaacatgctactatctttggtgaccttagattttcttatactccataagctcccatttatcttaagggttggtttcaagtcaaggaaaagaaaaaagaaccctggcatctaacctccttggtctacctctgtttcccttcatgattctcccaaatttgcaggggcaaggttttcctgctttcacttaattctatgtggagccttcaacatataaattctgtgaccaagtctaccaagcctggcttgatgtattacagagggagataaattaatttagaaaacttgtttctctcatgacaagtcctgcctttcaagctgattggcttgttgccgacatgaaaatctattttggctatgggaggctgaataatgattctttttatcttgcttatttctactgcaacgctgctatcctaatcttctttgccacacttcctcccttttcccccttcccagcatattgatgctttaagtggctaggaataaggtgctattcatagacttgcaaatagaagagcacatcaagatatgtaaaagtattgcttctttgcagaggtataaaggacagagggatgtaagactgattcttcctatagctgggaggaatgaatataaggagctggtatgtctcacttcaccttgtgatataaaataaagtggcagctttgaatatttgagttaaatttcaggagtctccatgtagctattgtggaaatattcttattgccactaccttctttgtcgtttttttttgaggcagactctcgccctgtcacccaggctcgagtgcagtggtgcgatctcggctcactgcacctctgcctcccgggttcaagcgattctcctgcctcagcctcccaagtagctggggctacaggtgcgcaccaccacacccagctaatttttgtatttttagtagagacggggttttgccatgttggccaggctggtctcgaactcctgatctcaggtgatccacccgccttggcctcctaaagtgctgggattacaggcatgagccaccacacccagctaatttttgtatttttagtagagacagggttttgccatgttggccaggctggtctcgaactcctgatctcaggtgatccacccgccttggcctcccaaagtgctgggattacaggcgtgagccaccacgccggcctgccaccactactttctttctgtgataaattcaaggaccctggggcttatccattacttttttttttcttttgcatttaatcacctaaggctgaagatttctgggctttttttgttctataatgtttctaagactgtgtccattaaatgcaaacaaaaataaggaagtcttggcagaacaggagaagcgatgcacacttggcgattggatcaatttaaatattattcatggcatatagcctagtcgctgctctagctgtttctatggcttgggcttcgtcggtcttccatggctccactacatcatttgctaatggatcatctggattgggagcacttaacaaggcctggatcgatagcagaactgtcagatctgcagtgctggggaccactcatctttcaaaatatctaaacatattcttcccaacttgtctacattaggatgataaattttggtcatgaaacgtactttaggagctgccattgcgtattcttctggaaggaatagttcaagtttaaaagtccttccctcaaagggggaatcctgagggccagcaatgaccacatgaaaataacaggtgttgctctcacgtgattctgcttggatgccaggaactccttctgccagcaaatgctggttgtccttgatgattctacggggcagcccagccatcttgtcagaacccgagttcgacctctggtcccgtctccggctccactcccctcaggcaggagtggaagtcctgggctggcttattcatttccagaggtcagtataattgcaacattctatagaagggaaaatccagcaacctatttttagtagagaagtctggtgatctttggccacatgatgtcactggtggtccagaagattttttgccatctctgcctcagtgccatgggcaagttccctccatcaacctagtcacgacctcttattgttcaaatgtaggcaggatgtctttctcccctcactgccatggccatgctgttttcccacagccaccacagcctgggctgccattgccacagctcctcagtgacctggctcttcggtttagctcaggtaagtgtaaccctcttccaacagagctgagtttggaggcctgccatctcaccccccgacattgttcctggaagcatacgtttccccctctctgaatccaggctgttcctttctccctcatctaatatttattctcatttcccattctagcatcaccactatctcttttgggagagcaaaacctcacttacataaaaaaattgtatattactcataatatatcttatacattttatccacatcttttctatttctgtgattccttctatgccagaatccttcaaatattacttaatattcactgtcttgactttatctcttaaatttagtgcagtaggattttcctcgtcttccacttgcacaaaactttcattttcaagatcatcagtgactatacatatacacacaggtatttatttggggaagaaatggtttagtcctacctcatcttcaataagtttatagtatagtgggaagaatatattaactacaggttagagtgggaccacaaagaagagtgaagttatgtttgctgatggttttagtggaattagaagcagagactagagaaatttcacggagtaggtagccctgtgctcctcttgaaagataagtagacagggagggacacttcagcagaggaaaaagggagcaataggtggagtgcttgaagccgccctgtgtgaatggggaaaggccattcacaccaatctgcaactcagagtatctgcagtataggttaagtggatttaagtgatacatagttggaattttatatgatggaataataatctgcccttactttgtaggggctggggagccactgaaggctttaagtaggagaatgtcacagtcaagttgaaatcgtacattgatcactcgtgtatctgtttaaaaggtagtttggaatagagatagactatggtgaacaacactgatactctgctagtataagatccctggccgggcgcagtggctcacgcctgtaatcccagcactttgggaggccgaggtgggtggatcccttgaggtcaggagttggagaccagcctggccaacgttggtgaaaccctgtctctactaaaaaaatacaaaaattagctgggcatggaggtgggcacctgtagtcccagctacttgggaagctgaggcaggagaatcacttgaacctgggaggcggaggttgcagtgagccaagattgggccattgcactccagcctggatgacagagggagactctgtctcaaaaaaaaaaaaaaaatttagaatcaaaacaaagcttaaaaaccatatagtcctttagttgtctcattctacaattgatatgtaaatctacagtaggtagcaaaattccttataaggctgtgttcctatatccaaaaccaggtttttttcccaaaagttgttcaaaataagagtaaccattgttaaacaaataaagccccactactattaatttaggctaatgcagaatcaagtggtctagatgagaagcagtgtgattacaaatctacccctgcaatttagagcatttgtcctggtggctcccaatttgaagctcatatatttgaatcactgtgtgttttctctgtccacagacatccaagatgtttctctctccactggcactgactagagcctctcagtgagactcaggtacatgtgacttgacaaacaggttcctccaacccctcaagaagaattaacaagtgctaatcactggaagcacacccaaggaagggggctcatataaatagtggtaagagataagaataagaaggattccttttttttttttttttttgagatggagtttcactctgtcgtgcaggctgaagtgcagtggcccaatctcccaggttcaagggattctcctgcctcagcctcccgagtagctggggttacaggcatgtgccaccacatctggctaatttttgtagttttacttgagacggggtttcaccatgttgaacaggctggtcttgaactcctgacctcaggtgatctgcctgccttggcctcccaaactgctgggattagaggcgtgagccactgcacctggccttgattctaaatttttatatttattatttcaattggttttggggggacaggtgatgtttggttacatgaacaagttctttagtggtaatttccgagattttggtgctcccatcacccaagcagtgtatactgcacccaatttgtagtcttttatccctcaccaccctcccagccttttcccctgagcccccaaagtccattgtgtcattcttatgcctttgcatcctcatagtttagctcccacttatgagtgagaacatacgatgtttgattttccattcctgagttacctcacttagaagagtggtctccaactccatccaggttgctgcgaatgccattatttcacttgtttttatgtctgagtggtattccacggtgtatgtgtgtgtgtgtatatacatatatcacaatttctttatctactccttgattggtgggcatttgggctggtttcctattttgcaattgcaaattgtgctgctataaacatgtgtgtgcaagtatttttttcgtataatgacttcttttcctctgggtagatacccagtagtgggatttctggatcaaatggtagttctacttttagttctttaaggaatctccacactgttttccatagtggttgtactagtttacattcccaatagcagtgtaaaagtgttcccttttcatcacgtccatgccaacctctattattttttgtttttttattatggccattcttgcaggagtaaggtggtatcgcattgtggttttgatttgcatttccctgatcattagtgatgttgagcattttttcatgagtttgttggccacttgtatatcttcttttgagaattttctattcatgtccttagcccacttttttttttcttttttttgagatggtgtcttgctctgtctctcaggctggcgtgcaatggcgcaacgtcggctcactgtaaactctgcctctgggttcaagcgattctcctgcctcagcctcccaaatagctgggattacaggtgactgccactgcacccagctaatttttgtattttttttttttttgagacggagttcactcttgttgcccaggctagagtgtaatggcatgatctcggctcactgcaacctccgcctcctgggttcaagcgattctcctgcctcagcctcccgagtagctgggattacaggcatgtgccaccacacctggctaattttttgtatttttagtagagatggagtttctccatggtggtcaggctggtcttgaactcccgacctcagggatccacctgccttggcttcccaaagtgctgggattacaggcatgagccaccacaccccacttaatttttgtattttttagtagagatggggttttgccatgtcggccaggctggtctcgaactcctgacctcaggtgatccacctaccttggcctcctaaagtgctgggattacaggcgtgagccaccgcacccggccttagcagactttctgatgggattgtttgtttttttcttgctgatttgtttgagttccttgtagatcctggatattagtattttgtcagatgtattgactgtgaatattttctcccactctgtgggttgtccatttactctgctggttatttcttttgctgtgcagaagctttttggtttaattaagttccagccaggcgcggtggctcaagcctgtaatcccagcactttgggaggccgaggcgggtggattacgaggtcaggggttcaagaccagcctgaccaagatggtgaaaccccttctctattaaaaatacaaaaaaattatccagatttggtggcaggcacctgtaatcccagctacttgagaggctgaggcagagaattgcttgaacccgggaggcggatgttgcagtgagatgagatcatgccactgcactccagcatgggtgacagagcaagactccatctcaaaaaaaaaaaaaaaaattaagttccatctatttatctttgtttctgatgcatttgcttttgggttcttggtcataaattctttgcctaaaccaatgtctagaagagtttttctgatgttatcttttagaatctttatggcttcaggtattagacttaagtctttgatccatcttgagttgatttttgtataaggtgagagatgaggatccagtttcattcttctacatgtggccagcctattatcccagcactatttgttgaatagggagtcctttccccactttatgattttgcttgctttgtggaagatcagttggctgtaaatatttggatttatttctgggttctctcttctgttccattggtctacatgcttatttttataccagtaccatgctgttttgtttgggtgactatggccttacagtatagtttgaagttgggtaatgcgatgcctccagatttgttgtttttgcttagtactgctttggctgtatgggattgtttttggttccacatgaattttaggattgtttttcctagttctgtgaagaatgatgatgatattttcatgaaaattgcattgaatgtgtagactgcttttggcagtatgatcattttcacaatattgattctacccattctacccattctacccatccgtgcctaggcaggtagagaaagaccatcaggtgggggcagggctaggcatgtctgagctcagactctccttggatggggcttgctgccactgctgcggggggtggaggtgtggttctcaggccaatggagttatgttcccagggggatcatggctccctctgctgtgtcacgcaggtctccagggaagtgggggaaagtcggcagttacaggcctcactcagctcccatgcagcccaaaaggctggtctcgctcccaccatgaccctcctttcccactcgcaacaacactgagtttatttccaggcagagggtgagcagagctgagaacttgcccggggctaccagcctcctggctgagaaagcaagcagggctttcaggtttcacaccccctgcctgccatggcttctgtgctgtgtctgcgctccgattcaccccctcccctaggttctgtccaggaaactttgcgtttggtggaaattgttacaaggttcagctggaagttttcttctccctatggtcttttcctagttcttctggcagcccttcccaaagctcctgtgagacaaagttagaaatggcttctctggggactgagggtacccaaagggctcttcccacctcttcttctacccctgtattttgctcagctctctaaatttgtctcagctgtatatgaggtcaaattcttctcctgtgatttgggccttcagattccccaatgagggtgtgtgtttgggggcagatgatccttctttcacactttcacactttgggcactcacagttttttagctgtcaccgggggcctgcagcagcaacccacttcctccaaaaggtctgtggattatctcagctttcctggtatgtttttgtggtagtccttggagcaaaagtttatgatgtgagtctccacacgctgctctgtgcgtccaagtgggagctgcaagttagtcctgtctcctatctgccatttttctgaagttctctggtctgaattcttcagtgccttctcactgccctaaggactaagtccaaactctccagcctggctttaagggccaccttgagctcttttttatatttttgatagggaaagaacattttaatccttgggggtgtgtgtataaaatggcaatgatatgtggtgtcacaagatggcagcattatatttattatatccaggtgctatgagcctactatgtgcagtaaatagaaaataatgcttttagtgggttcataaggatataaattgcctttgaaattttttttcttacagcgtgtttatttctatctttatcctagttgcatgcagtttatttcaatttttttcatccctggcactaaaaatttaagtttctcgttttctactaatttttatgaaacatgggcaaaatgcacaaataatgctgtttaaggtgaggaggcaggcaataccccctctccaccgcattctcaatccacctactgctgcaccaaagtctgctgttgtacaagcgactgaattcagcatatacaagttatactatatacttacgaaaatcaaggagaaacttaagtcagaatggacccagcagtagttttaacactttttttccccatggtgcaacagtagcatcagtttttttttttgagacagggtcttgctttgttgcccagattggagtacagtggcatgattatagttcattgcagcctcgaactcctgggctcaagtgatcctcccttgttggcctcttgaatagctgaaactacaggtgcctgccaacatgcttggataatttttaaatttttttgtggagacaagggttttttctatgttgcccaggctgatctccttatattgcccagggttcaagtgatcttcctgcctcagcctcccaaagtggtgcaatcatggctcactgcagccttgaccttttgggctcaggtgatcctcccacctcagcctcctttgtagctgggaccacaggtgcataacaccatgcctggctagttttttatttttattttttgtagagatggggtctccttatgttggccaggctggtctccaactcctgggctcaagtgatcctcctgtctcagcctctgaaaatgctgggattaaaggcgtgagccactattcctagtcctggccaattttaacattcttgattccatagctttctttgtgggaagatgattttgactctgtggcaaaaaggagcagcaaagatttaaaatgccagtcagacagcaggttacaaaagttgaactgtgctcatggcaggactcagtaaatacctttttaaaaaatatagtacattgatttcaagcatagtgagattctccaacatctatgaacattggttcacgtaacatacaatttattcttttaaggtatattacttaggaatttttagtatatttgcaaagttgtgaattgattactagctaattcctgaacatttttatcacttcaaaaagaaatcccatactcattagtagcccctccctgtacttaccctggctctcccagcccccaattcctggcaactgttaattaactttttatttgtatggatttgcctattctgaacatttcacacaaatggaatcatacaatacatgatcttttgagtctgacttctttcacaaagcaaaatgttttcaagggccatccatgttgtagcatgtaattaatacttcatgccttgtaatggctgaataatatttcattttatggatataccatattttatcagtttatcaggtgatgggacatttcagttgtttacactttttggctagtgggaataatgctgctattagcatttatgtacaagtttttgtgtgaacatatgtttttatttcttttggataaatacctagaattcctgggtcgtatggtaaatctatgtttaatgttttgaggacctagcaaactgttttccaagtggttgcaccattttaaatttccaccagcaatgtatgaagtttctaacttctccacattcttgccaacacttgttattgtaggtctttctttaattgtagccatctttgatattaaatagtattaatgagaggccaataggtatgaaaaataggtatgaaacaattttgtagacataagaaatttctttctgagacatctgataaatagtttaacatattgttgaagtttccattttttcctctctgttttcctccttttttctcagatctttcttcctctatttttttttttttttgaaatggagtctcactctgttgcccatgctggagtgcagtggcctgatctcagctcactgcaacctctgcctcctatgttcaagtgattctcctgcctcagcctcctgagtagctgggattgcaggtgtatgccaccacacctggctaatttttgtatttttagtagagatggggtcttaccatgttgaccaggctggtctcaaactcctgacctcaagtgatctgcctgccttggcctcccaaagtggtgggattacaggtgtgagccactgctcccagctcttttttcctgttatacctcttttctttcctttagttttttaaaaaattacataatcaaacatgtctattttaacattaaccaatagagggatgtaccaaaaaaaattaactcaactcactgcaacccactgcaacccctgacataaccaatgttagtagtttattgagtataacctcacacttttaaaaatgtatgcatatgtacataagtttatgataaaaatatcattcaatactcatcactctgcaacttacttttgaatatattaagattatttctatattagctgttgtaagcacacttaaatggtaggtaaatttccttgtctttctagcttccaaaatatatatgacacacaaacaaacaatatttagtatatgcacacacacactgcatctctaattgatcctggatttcattttgttgtatcatgagaaagaaaactgttagtatggtcaaattgactagttttgactttgccttatgttcccatttgttttctctgttctttacatgttcgatgttcaccataatcacttggattaaaatgtgtggattagtttttggagatagggacctcaccatgttgcttaggctggtctccagttcctggcctcaagggattcttctacctcagcgtcttgagtagctgggattacaggcataagccactgtgcccagcttaaaacctgtggatttatcagtagaaaatgttcatgtaaagatactcctgtaagagaaaccatagctgctccagtggaaggaagcttaaactcatcccttcaagaaagaagctcctccctttgtatttctactgggttttgcatccggactgatcttccttccctcacccacatgaagtgtctaccttctgcagactacagtggctcaggaaccggggatgcagtgccaggctcatggtatcctgcagcagatgtggggagctttccttctctatgtttccatgaagatgggaggtaagtctcaatctaatagtaaatgctgctaggaattttcaaaacaatttcctttcagctaaattattgcaaattttgacatttgtaatgagagtatttcctgaatatacattttcctaacgtggtgctaattgtcctcctgttactattgctgctgctgttactgcaaccatttatttcagtctaagaaattctcccatcaatggcagttcttttgtgaccacatggaagcatcatttaaaaaattattccaatagtttttggaggaaacatcatttttaataatgatggggcttctgggggtgctgccctagtaacaatcatgtatcttgtcataggcactgcaggacaaagccttgagcagccctctgaagtgacagctgtggaaggagccattgtccagataaactgcacgtaccagacatctgggttttatgggctgtcctggtaccagcaacatgatggcggagcacccacatttctttcttacaatgctctggatggtttggaggagacaggtcgtttttcttcattccttagtcgctctgatagttatggttacctccttctacaggagctccagatgaaagactctgcctcttacttctgcgctgtgagagacacagtgactatgaggcctccttaactgtgccaaaattcaaaagacaatcagtggagtacaggtgggcttgagaagttctagaacttcctgagtgtatctttgcttaccgtctaattttaaacttgtttagaatatgtagcatagggctctgagacggaaccccattattttctgaaccattgattgctaaagagaaggataaactattttctctctctctttcttctttagtttcttcttttcctcttcctcctgcttatttatgcctccagtatcctgtggttccacgtatggaagatggaatttacttttggaggaagctttttatacaagggaaggatcccttggtgagtgctttagtttatgcagtagtaagttacattaatattcatgtatccttgggaggctctgaaatttgtgaagtaaatgcaaattcctcagcttgagatagtatgatttcatttaattatgtcaaatatatcctcatttttgtatttacctgagtgataatgttgatattatttagcattttttggtggatttatccaacatattggagagtgtgggggctgtggacttagagggtgaagagaagatcatggagagctcttctctgtgaaacagaagagtgaggtcatgcgatgaggtgggggtcaagtgtggaaggagttggtcagtagggaattcctgtaaaagcactggataatggacagaacagtaatataaaatattcagtttaaagattttcttttactgaattgtaatttttgtgtgctatcctaaatgtttttgaagtttgttaaacattacagcctacatagtttgtccttagagggcaatgcagaatttcttccccataggtgaattattttttggcttagtacatttatgtatgtatgtatgtatgtatgtatgtatgtatgtatgtatgtatgatggagtctcgctctgtcacccaggctggagtgcagtggcccaatctcggctcactgcaagctccgcctcctggattcacgccattctcctgcctcagcctcctgagtagctgggcctacaggcatcggccaccacgcctggctaattttttctatttttagtagaaagggagttttaccgtattagccaggatggtcttggtctcctgacctcatgatccaccagcctcggcctcccaaagtgctgggattacaggcgtgagccactgcgccgacctctattagctaatttttaatgacttattttggggtaaacagaataagagggacttggtggtagggagtagaaaggtagagtggatggttttcactcaacaaatattttactgaatacttatatgtgctaggcactctttcaattgctatggtgcatcactaaataaaacatacctgcactgaggttgcttatgttcttgtgaagagagagagtaagtagatgttttagcagactttgaaagcacagggaaaatacatttgaccctcagaactcagcttcattttctttaataggaagagagctgagatgtatgtaagcaatgctgatgtcctgtgcttgttataattttataatataaattaatcatcagctgaataagggctgtataacattggatagttataagactgcaagtcaagttatccaaagaatctcagtctttcaaattattcaaatgtagctgtgtctatagtgggactctatataaaatcagaaagatactgaacgtttgaatggagaatctaacactgaggcaaatgacctttaacatgtgagttatttgtaaaaatgaaaaaaatttcgagtgcttcattgaaatcaagaaggagataaagtctaaaaaactttcagcaaggagtgaatggtcaatggaaatgaactatacaaaatcaattatcttaaatttgaagacgtgtaagttactgatattctccttaatcagtatgctatctttttatctttttaatttagtgaccatgaagagtatccgtaagaacttttataggttcattttgaccttgttttcatatctattttctcctaaagtcttaatttttttttttgagatggagtctcactctgtcgcctaggctggagtgcagaggtgctatcttggctcactgcaacctctgcctcccaggttcaagtgattctcatgcctcagcctcccaagtagctgggattacaggtatgccaccatgcctggctaacttttgtatttttagtagagatggggtttcaccatgttggccaggctgatctcgaactcctgacctcaagtgatccacccaccttggcctcccaaagtgttggaactataggcatgagccaccatgcccagccaagccttaagtttttagataacatgtttttctgccacagagattttcaagaagaaagagtaccattctttgttactttctctctctgctagtagagtttctctttaacccagcaacttctttcatttccacctagaaggtggttgaatgctagatgttggagcaagccattaccagaggataggagacaaggtttttcgaattattgtagatcaaactgggaacccagctctcttgtcatgttcaaagagcagtagctgtgtttggacttcggagttagatatttctaagttcaaatccaagcttcacagggtgttcagataaaatctcacagaatgaaagaaacataggaaggattggaaggaatttgacatgtatcaaatctaactatcttctacaatgtttgagtaaagctctgatttttgagcatctctttgaccttgttttcttgagtagttggggatgagtccagcttcaatgtctcttgccttgagatcttacctttggagctttttatatccctcagttcgggcaagatagaacatcccattgtccagttattttctagtcctgtggtatctgtggagtttccagagccacactggtgctcggatgtctggagcatgttctcactgtggaaattaacctcgctttagttctagttcctaaggaagataaccaagagaacacaggtggaagaagcttgcatcaagaagactacactctatcttggaggtgaactgttcactattacatacataactcaggaaaacttagatacctctcttgtttcttttggcttaatggtggtaaataatttaggtgttactgagccctaggttattcaattgtttcttgtggtttctctactcccatatctttgtacatagttcctatgcagagaaaactctccgcaaattatcatgttttgagtaggctatctattgctttttggaaaatcagcaccatccatgtgccttaagagtgatttgcacatgtactcaggggtacagggaagtgaaggaggtcagttggaagaaatacaaaaaccaagatcttcattaagaagagtttaaaaattttgaaggaatagttggatctttttctaagaaaaatccttaagagatttgataatatgaatttggatgggaaataaggagtgtgctgtgtaccactggatttaggacatgagcgctggaggcccagaatgcacacataacccttctcaggcaacccttgaggctgtggtttggatactgaaccaagggtaaaggcacagacaaaagctgacattttgagggatcagtttatgaggtggagtaaaactctaagctggactctgccagtacccttttgaaaccctgtcttttttcctaaatgaggaatctcaattccagatagaaaatgaggacgaatggctcacgcctgtaatcccagcactttgggaggccgagatgggcagataacaaggtcaggagtttgagaccagcctggccaatatggtgaaaccccgtttctactaaaaacacagaaattagctgggcgtggtggcgtgcacctgtaatcccacgtacttgggaggttgaggctggagaatcgcttgaacctgggaggtggaggttgcagtgagctgagatggtgccactacactccagcctgggcaacagagtgagactctatctaaaaaaaaaaaaaaaagaaaatgaggacgaaacacagccttggttgaatgttctgccaggcagtgttctgtgtggcttttgagcaagtgcaagcacataattttcctatttgtcatctttctgaatctcaagcaagtgcttcctgcctggaagacattagttcacatatttgactcacgtatactctgaattttaagtgtattttgactctgcctctgcagtggttaccacatgcttatccattatttattattgagttttatatgcatttgtacttttcaactgacccatatccagccattggtcatacatgagctttcccttggctctgttctcctgggccaattctgggcatggacttttaaactcaccttcccattttgacccagccattcctcagttatcccctcagctgaaacttgatttctgtgaatgcacttagtcactgagtgtggggagggaggtgacttgaaaagcaggtgctacatctcataattaaattatgtaatcctggtacttcagaatctcctggtctctgttgttacatttccttatgaacttctgaggggattaggaagtacttcagaacttcctttcctagtaggcatatgtttcttttttttttttttttttgagatggagtcttgctctgttgcccagactggagtgcagtggtgcgatctcggctcactgcaagctccgcctcctgggttcatgccattctcctacctcagcctcctgagtagctgggactacaggcacctgccaccatgcctggctaattttttgtagttttagtagagacggggtttcaccgtgttggccaggatggtctcgatctcctgacctcgtgatatgcccaccttggcctcccaaagtgctgggattacaggggtgagccactgcacctggccaggtaggcatacctttaaataatactactgattaagagaggcctgtgcatgttttgtggctaataagtaggcagaactagaataaataagatttacacttactggtctagacaacttaccttgggaattgcaacctaggtttggggacttgaccttccaagtctgtggactgacttgcaaactaaccatacttttcggcttgctaaccaagtcttgatctggaaagtaagatctccccgaggactgtcagatctacttgggcaatacttttcagtctgcattagaatcacattttaaaattccctatgcttaggtcccatcccaggtcaatttaatcagaatttctggtgatggagccagaactatttaaataaaagtctcccaagtgattctaaatgaaacaaagttggaaaactacagtctcaaaagataaattggactaaacctctagagttgaaaactcacccaaatttattgtacaagggtcaaaaagtggctgagtgccccatctgggatggtgaggcagatgaggggttgctggttactaatattggcattccttcctttcattgtgagttgctcttataacttgcacctgctgctctctagcaacatgagcctgaggtccaatgttaaactgaggcatgtgacacctgtgctcagatcagtgggcacccagggaccattaaagacttttctttcttacactctttgcctttgtgttccttggagaagaacttcaaaagagcaagcccttcctcagggccatcatggtcatctaaggtttagtacacattttagtaatgacacattaaagataacttaaatatacattttttgagggataaatatcaacatgaggaatagaggactcttggccaggtgcggtggctcatacctgtaatcccagcgctttgggaggctgaggcaggaggattgctatgggttcaagatcagcctgggccaatagtgagattcctatctctactaaaaaaaaaaaaaaaaaagaacagaaggctcttaattacctgtccaagctcttcagacaatcaagaccagtccttgtggagattaaaaatttcagaaactaaaagtttgttatagcttggtcattgctctcatgaagcagcataacttggtcctcctagtgctctgtgaatgtgaaaatgaaaactctctttgtctgtgcttctgttgctgttgctgacgtactctccacttgtctggtttattgataattcactctccagtattacactccatcctctggagggaatgatggatcccttcatcacaaaatgttttctgtatttgcactcttctatgattccctgctcatcccttaagacaaacccttctttaagtcccggatgataacaagagtgatgattgcagcactctgtatttattaagtgtctaccatgtttcagaaacttcacattagttatcttattcaatgctcttaataccttgtattggtccattttcatagtgctataaggaactagctgagactgtataatttatgaagaaaagaggtttaattaattcatagttccacaggcttaacaggaagcatgactgggaggcctcaggaaacttacaatcatggtggaaggtgaaggggaatgacacatgtcttaccatggtggagcaggagagagagacagtgaagggggaagtgccacacacttttaaaccatcagatctcattagtatcagttagtatcagtcagttttcacactgctacacttactacctaagactgtgcaatttatgaagaaaagaggtgtaactgactcacagttccacaagcttaacaagaagcatgactgggaggcctcaagaaacttacaatcatggcggaaggtgaaggggaagcaacacatcttaccatggtggagcaggagagagagagccaagagggaatgccacaagcttttaaaccatcagatctcatgagaactcacacactatcacaagaacagcaagggggaaatctgccttcatgattcactcgcctcccaccaggcccctcctccagtttgacatgagatttggccagagacgcaaatgcaaaccatattatgtctcctttgaagtaagtcttattgcccttattatatatgtaaagtaatcaaggtttagaaaggatagttaattttcccaaggacacatagctggttgatggcggaaccaagattcttctaacagactctaaaagttgtactctttccttttcataccaatatatttttaaaaatgggtagatatgctgaaagtttatcaggttttatcattaaaacctggggtcactgaagtaaagctatctttcactaactatctgtaaattgatagtcaactatcctgggaagttaagtgacccgccacccttaatatttagcatgaatcaatttaattagttcctttagtttcttcagacaaatggaagttatcttaaaggggatggaataaaggaagaaagaagcagttgtgcaaaaggaggtggaaataggtctcagaaaggatgctgttgaaatgaaggggcccacttttttttaaatgaaattgctttttaattcagttaagagaataaaagagatgaaatatgcagttatattttcttttatacttacctacataattacctttaccagcactttttttgtgtgtgtgcatagattcaaacggtattgtgtggtgtcacttgctttctgcctgaagaacttcctttattatttcttgtaaagcaatcttctactaacaaatttttccctgcttttgtttatcttgaatgtctttatttagcctttatttaaaactagcctattttttccagagatttaaaagctcactttatatttgctttctttaaccttttattttaggtttgggggtacatgtgcaggtttgttacataggtaaactcgtataacaggggtttgttgtacacattatttcatcacccaggttaaggccagtacccaatagttatcttttctgctcctctccctccctccactctccaccctcaagtagaccctagtgtctagtgtctgttgttcccttctttgtgttcatgagttctcatcatttagctcccacttataagtaagaacatacgatatttggttttccgttcctggttcctccagcatggatggagctggaggctattatccttagcaaactaacccaggaacagaaacatacatctcattcttttttatggctgcatagtattccatggtgtttatgtcccacattttctttatccaatctgtcattgataggcattttggttgattctatgtctttgctattgtgaatagtgctgcaatcaatgcacattcgcttgcatgtgtctttatggtagaatgatttgtattcctctgggtatatgcccagtaatgggattgctattaaatgtaaacagtaattcttcctttagctctttgaaggatcgccatactgctttccacaatggttgaattaatttacactcccaccaagagtgtatgtgttcccttttctccataacctcaccaacatctattattttttgcctttttcataatagccatactggctcaagtgagatggtatctcattttggttttgatttgcatttctttaacgatcagtgatactgagcttttttttgtttgcttgttggatgcatgtgtgtcttcttttgaaaagtgtctgttcatgtgggatccaggtttcatacagcaaacagaagcaagcacaggtgcagcctcatgtttgtttacattgattcagagtttgagctggtttcactggtttgactcacagttttctttgttgaggctaggtgagttcctgctaacaactctgtaccacacacacacaaatcactcagtatcactcaagattagttctgttttaatgatgaacttagcattcatacatgcaatcctaagagtagttatagtttgtggatcaactcacatatgaccttaagatctcatgtcttctgacaagagcaatatggcacattggcttaagtgccgcatagaagacttgctagaccaatcactgtcttctagattctattagaaatgctattttttaaatgtccagttggaaattttcaatggcttgtttcaagattaacaaattattgtggactctgtactgccttgcttgtcgtctcatactatgtgtaacatgtattatatgtatgcataacatataatatccttcctgatattatggtgtttctgtatagcacagtgtgattcttatatccacattaatatatttttacctttacgaattttgaatctttccatgcatttgtttaaattttactgttaaaatgggccaacatgataccacacatccaaagaagtgaaaaatatgccagcgaatgaaagaatacatttaccttgtttttggttattcaccaaggaactgtccatgcttgcttttaggttgccatgtagttgaatcttctgtcttcagtttcccttaaatgttctcttttttttttttttcttttttcaggtgagaccaggacaggtaatgggcagaactgacaataatttcttcagtttaagatacatttcaagagacttttgcagtgcggtttaaattcagcaacaaatggccgggcgcggtggctcacgcctgtaatcccagtactttgggagatggaggcgggtggatcacgaggtcaggagatcgagaccatcctggctaaaacggtgaaaccccatctctactaaaaatacaaaaaattagccgggcgtggtggcgggtgcctgtagtcccagctactcgggaggctgaggcaggagaatggcgtgaacccgggaggcggagcttgcagtgagccgagatcgcgccacggcactccagcctgggcggcagggcgacactccatctcaaaaaaaaaaaaaaaaaaaaaaaattcagcagcaaatattgatttctgtgtctgctcgtagttattaggcaatagaggcagacaaacacaaatgaatgctttatgtcctttgagggctcacaatccatttgaagtggaaagagagataaattccttttttttttagactttttttttttttttttagatgaagtctggtactgtcacctaggctggagtgcagtggtgcaatctccgctcactgcaacctctacctcctgggttcaagcaattatcctgcctcagcctcccaagtagttgggattacaggtgcatgccactatgcctggctaactttttatatttttagtagagatgggggtttcactatgttggccaggctggtcttgaactcctgacttcgtgatctgcccacctcggcctctcaaagtgctgggattacaggcgtgagccactgcgcccggtaggagataaattcttgactgtaatacgtgacagactggggcaaggtctatactaaagaagccatggcaataccagggaagaggagttaagtcctgcctgggaaaaacagatgaggaagtatttaatatggatctgaaggaagcataaattgtcacttggtcaatatggagagggaggacttatattccaggcagagaagagagcttgagcaaaagagtacaggcaagtatagagcatgctcacggaacggcaataaatcagtgagggtgggagagggaagcggaggaaatggcttaagagaacatgtatgtgaagccaagattgcattggattttgaattccagattaaggagcctggccttattcattctaccttcaccgaagagtcctacagattctgtgtttcagagggtaattttgattgtggtctagatgaggaagaactagtcaggaattaagagagacagtctacactgaatcagtttgagctggtttcatagttttgaggagacagaatctgatgtgttagcacatcacgagggtgagggacaggaagaaaacacaaataatccagaattttcaagttcaagtgcttggaaatattcatgccatgcacaagcaaagaaatggaatttagaggggtctaggattaggagcaaagacaatgaaacaaggggttatggagccccctttttactcttttcaaattttctggcatgatatactttctaagacattgacacattctcatcttattcaacctttggtaaggcattttctcatctcacaagatagaggtgatagaaataatgtatccatttatttctaaaagattatgtaaaacaacctgaaccagtttaattaggggaaaagattttgggtcgaaataattcagaattttctgccaaagaaagtgaaaataaattcactttaaatccttagcagtttattgggcatttgtcacatgcagcagtagctgaagagagtggcagtgataatgatgcagatgtagttacttattttcattcagtccttcaacctgctgttatcctcttcagggcagacttcacttcctggttcctcagtgtatagatgagggggttcagtaatggagtgacaacagtgtaaaacacagccgctgccccatccagggggtctttggagccagccctaaggtagatgaaaatacaggggacatagtagactgtgaccacgattaggtgggagccacaggtggagaaggcccggcgcctcccatcagcggtgcgtatcttcaggatggcatggactatgttggcataggagagcagaattaacatgaagcaactggcggccactaccctgacgtccacaaaggtcacaagctcattgacagttgtgtcagcacaggccagtctcaatactgcgcggatgtcacagataaagtaatccacctgattgggcccacagtagggcaggcggaaggtcaaggtggcctggatagacccatgcatggagccggcgacccaagctccagccacaaggactgtgcataacctcccattcatgagcactgggtagtgcaggggctgacatattgctaggtacctgtcataggccatcaaggtgtagaggaagcactgggtgctgcccaggaagtgaaagaaatacagttgagccacacagccaccaaacgggatagccttgatggaaggagtaaaatccaaaataagccgaggaacggtgactgaggagagccacatgtccaggaatgagagcactcccagaagaatgtacatggggcgagcacagagcttcgggtcagcccacatggtgagcagaatgagcaggttccccagctgagtgaggatgtaaatgatgaagaagaccaggaagaggaggcttcttagatttggggggtgagacaaacccagaagaatgaaatctgtcaccacggcatccagcgatgtgtttttggtctttcccatgtctttttgtagtctgctaagatgaatggtgacgtttgacaagagaaacacagcacaatgatgttgtaagtgaatgcttttgtcggatgattgatgcctaggaattatgagataaacaagatagagtcaaattgttttttaaaagaggaggtggtgtcaccattagttatttaggtttacttaaaaggagaagtcctccagaggctggttagtttcctagatgggaggaaactcttgtccattgagagatactgaaagccaggatttgccagatgaaggaagagggacacatgagagtgatagagaagtaccgaaaattccaaccaaaaagtgagttcgccaaggaggggctaaagttgatgcagagcagtgtggaacaaacaccctataatgaccacatctactttttcttcacctactatcattgtcccctttttcctcagctaaaatctcatctccttaacatagcatgcaaaaatattcctcatctggcccttatttatatcgctattgtaccacttgtaattccttcttattgttgggaggcatgacactcttcaagcttctcacagtagtgtgctctaacttgggacttatgcacacactatcttttctgctcccttcacataggtagtgcccacttttccttcaggattcagttcgagtgtcttcaccttcaagaaggctttccggatccctgaggacaatgcttatacttttctgagcacgtacattatgttgcattgtctaatttctgtttttctctcttaataatcatcctgtctagcatgctaaaagtgataaataccgtaattattttctgaatgactgagatagatagaatggatgttgccaaatccccctgactgaatacattgtttctcttgatcttttttgtctgacccctgtgctcacatggctgggacttttaggtcaagggaccacctcattcaccatgtaatatgggtataatttcattataaaaaactccaagaaacatttatgcctgtttttgctccaggatatcatttagatttatttgttgatttatatggttcattggattgggattgggttttttttttggtatgaggtcacagaggaatttttattgtttgttataaaatcattgattaatgcaggacttgatctttagtgtgcttgtgtgtaatatctatgtattgcagtctatcaaacagcaactctctctaaagacatttacagattttcaagtatctgaacaagatgataaaatagagggatggaatgtgtttgtttcactctttttgttaaataggttgcttgataaagacttttcgctctatatatggtttgagatgcatttatctttcatttaactacaaaatatctttgtaatgcaaatgactactttcataaagcaattaaaatgacaatagattattataaataacatgtgaatattaataagtttaactaatctctatcggaaattctccaaagagattttatcttaagtattctgtgaaataacttaattcatatgttaacattcaagagttattagtagtaataataataatactgaatatatctggctcttcgaagtctggaaaatgttaaacttgtcctttgcccaccaagaacgaagaaatatcagatttttattgcctgagtttcaggaggacactttgatttatttgaaaatggatgggaaaactaaatcttatttttgtggttagaatatagagaaaagaggctgggcgtggtggctcacgtctgtaatcccagcactttgggaggccgaggcaggcagatcatgaggtcaagagatggagaccaccctgaccaacatggtgaaaccctgtctctactaaaaatacaaaaaaattagctgggtgtggtgtcgggcgcctgtagtcccagctactcgggaggctgaggcaggagaatctcttgaacccgggaggcggaagttgcagtgagtggagatcgcaccactgcactccagcctggtgacagagagagactctgtctcaaaaagaaaaaaaaaaatgaatatagagcaaagatagaaagagttgagattaaaatggtgcataaaatactaattatggccaggcgcggtggctcatgcctgtaatcccagcactttgggaggccaaggtgggtggatcacgaggtcaggagattgagaccatcctggctaacacggtgaaaccccgtctctactaaaaatacaaaaattagctgggtgtggtggtgggcgcctgtagtcccagctactcgggatgctgaggcaggagaatggcgtgaacccgggaggcggaggttgcagtgagccgagattgcgccactgcactccagcctgggtcacagagcgagactccatctcttaaaaaaatatatatacatatacatatatatatatatatatatatatatatatatatatatatacacacatatacatatatatatatatatatatacacatatatatatatatacttattatgagctaaaagtaattttcttttctttctttttttttgtgtgattgagtcttgctctgttgcccaggctggagtacagtggcctgatctcggctcactgcaacctctgcatcccagattcaagtgattctcctgcctcagcctcccaagtagctgcgactacaggtgcgcgccaccacgcccagctaatttttgtatttttggtagagagggagtttcaccatattggccaggctggtcttgaactcctgacctcatgatccacccaccttggcctcccaaagtgctgggattataggcgtgagcaccgcgcccagctgagctaaagtaattttctttgccaatacaggaatataaactagtaggcttctacttaggcaaataatatattcatgaaatgttttatgaaaatccatttttatatttaaaatcagatagaactgtaccactggggcaattatttgaaggacttccatgatgcatactttcgtatagtgaaaagtttatccctaatttatctactttgccggtctgattttcccccttttgttgtgcctaagtctggtttcatttctcccagcctccctgttgaaagaaagctctttttacccctctaggttctgggttccctgcctgggaggaggcaggaaactgagatgggttatagctggtcggtttgaggacaggatacctttccaggcagacttggtaaagaacagtggttttagcttggtgtttggtattcagaggctgcagaggaagatagcttagacttccagaaggtagatttttggagaaacaaagagtgtgtttacagaaggattggctttcttggcaagagaggtgaacagtctgggaccaccttagaggagacaaaagaaaggccgggcatggtggctcatgcctgtaatcccagcactttgggaggatgaggctggagaatcgcttgggcccagaagtttgagaccagcctaggcaacatagtgggaccctgtctgtaaaaaaaattttaaaaattagccaggtataatggtgggcacctgtagtcctaatttctcaggaggctgagacaggaggatcactggagcctggaaggtcaaggctgcagtgagccatgatggtgccactgtactccttcctgggtgacaggttgagaccttgtctaaaaaaaaaaaaaaaaagacaaatgtagaggccgtatttgtgtatcctcttttccccctcccttatcttccagatttgtgtcattttattttaggtctgttcctcttttttagcttttgaaacttatgatatttaagataaggaaagttaaatacaattttagtatatctaccctagctaattagataaccaaaatattctaaaattccccaagttttagactgtattggatattctccaattggataggtcagaatttaaataatcaaaacacatgaaaataacaaaaagttaaagttcaatataaaaagcatctgaaaataagagcccagtgacatcagagaataaacagcatatttttacaaagcaattatcctggaaactctaagaagagactttgggaatggggtgaaagagtagcactgagaaggtaaggacagggagggtcaagaacaccttcaagggacctctatggcattatgggatcacaggataagctgctttctatgcccctactctgccccaaatcaagctagtttgatatgtgaacacatttcttgcagtgtatttagagaggtgccgaggagggcaagcctctatccagcaatttgaaactagatttctacagtgacctttgggatctggactactatgcaacggttatgaaatcttgaagatgaggagtgaaggctggtccagcattgcgttggacacattatgatcaaaggactcctgtttacccttgtgacaaaactcaacccaatctgcttccaaaaagaagtttcaccttctgtcatcctttattcagagttagacatcctggtagagctagggcagagtagaggaaatggatagaatttgaggtggcctagacatattttatcgaattcacaagagtacattctttcctattaccgggggttaaaaaaaacgaacttgctttagaaaaagtacttagtgccctcttcattggagaaggggaaggttatgaatccagcctttctttgtgtttgcacaatcactgaagaatattcttcaagacccctatgactttatcactgcccaactctgccctttatcactgccctaataaaaagagaatatgaaaagaaaatagtgttgtaatgcttttttttgagtcattttctcaacacaaaaagagtttccccaagtttgaaaacaaggaacttaattctagcccgtttgggaaagagttgaggaaacgcatggagaaaagagacggattaaattaacactcggacaaaataacagaaagtcttaaagttccaaaattagtctgcagccttattttgaacatagctggtgtcaggcctgctttttccatccttttagactcacttgtatagagctgcacaattgtggaggaggctggctgtccttgagtgcaacggtccagcggatggagagatggtcttcagagattcagtctagcctactataaagggctcccacatctgtttcggaaagcctttataatttttttttaaggagtttggcccagcaaataagtgttcagaatctttgagaacgcctgtctttggggttcttggacaagtgtgacttctgtatatattcagtcatattttatatcagtttccatcagctgttgcttttttggattaaaagaaaaaaagacactgccaagagatttaaagaaaaattctaacctcgagggaaaccctactactctgaagtatgtccctaatgagatctttcctcaccaaatcctcattattttgttttgagagagagagctggaaatgtttccagtaggatccctggataaggaactgtggggaataaccttgtttgcatgttatttgaatgacctctaatttcttagaggtgttatgaagtctcaactgatccccttccctccccaaatactcatcaggattccaccatcatcttcaggtttctgttcaggcatcacctaatcagagaggtttctgttgactctctcctttcccttccctattttatttttctctcggcacttgccaccatttgacatactgtatttacttgtttgtttactgcttgtctcccttcactagaatgtgggttttgcttagctttgaatccccagcactactagcatagtgcctggcatgtaataatttctcaatatgtacttctgaataaattaatagttgaaactgccacacatgttaaatgctgtgggcagaaaaaaaaagctgtggtttcaaatataaatctaatgtttaaaattacctggagtagatctgacatcaaattgatcctcgagtgacctgcatataccagggcaagtagcttcggaaatctatttattcattttttcatatttaatgttgggcagggcacagtggctcatgcctgtaatcccaacagtttgggaggctgaggcaggaggatcgcttgcagcctggagttcaagagcagcctgtacaatatagcgagacctcatctcaacaataaaatacaaaaaattagctgggtgcctgtagtcctagctacatgagaggcagaggcagaaggagcgcttgagcccagaaggttgagcctgcagtgaaccatgatcccgccactgcactccagcatgggcgactgagagagaccctctctcaaaaaaaaaaaaaaaaaaaaattcatgttaatctaaataacagtgggaaattgactacaaatgaagatatgaagcctggagtgtgataaaagcttcaagagtttcaagaacttcccctgtaagatgatggagctcgacaaagactggatgatttctaagtttcttttaattctaaagtaagaaaatgttaggcgtgtgtgtgtgtgtgtgtgtgtgtgtgtgtgtgtgtgtgaagttgcactgctacctgttgccacaagatgacagtatcatctttattgaaacaaagtacagttgctatatggagtaaatagaaataaatccagagagttcatgagggatataaattactttggtaaagatattatatgtgaggcattaattagtttgggaaaactatgtatcaaaaagagttaacttccttttgtaacacatgggaaatagtttgaaatatagttttcttcctccctccgtcttttccttcctgttttacacctagtcttcctccttccttttttattctttctttttctttcttccacattctcagtttattatgtaacaaatttcaagtcaaaggaaacagagatatataagaaaaagttaacattttcaccatttcttttaatttcactcatctgaagaaactaattttttttttttttttgagggagttttgctcttgtcacccaggctggagtgcaatggtgtgatgtcagctcactgcaatctccacctcccaggttcaagtgattctcctgcctcagactcccgaggagctgggattacaggcatgcgccaccatgcccggctaattttgtattcttaatagagatggggtttcaccgtgttggtcaggctggcctcaaacgcctgaccttaggtgatccacctgcctcagcttcccaaaatgttgggattacaggcgtaagccactgtgcccggcagtaactaatgttaatagcttttttctcatttcttcctgtatattcgtacatgtacatacacctacagacatacaaattatgtttcttttgaactttaaattaatatctgatcatctgttgggagacaaatttagatggttgaaaactctctgtttcttccttattgtcacaaacaccaccaccaccactaccaccaacacacacacacacacacacacacacacacacacacaccccccacctctaattgcaaccttgtttccatttcttcctgtcttgagaagagaaacacttatggggaaattgaatactttgtctttttttttttttttttttttttgagacggagtctcactttgtcgcccaggctggagtgcagtggcgcgatctctgctcactgcaaactccgcctcccgggttcccgccattctcctgcctcagcctctcgagtagctgggactacaggcgcccgccacagcgcccagctaatttttttgtattttttggtagagacggggtttcaccgtgttagccaggatggtctcgatctcctgacctcgtgatccgcccacctcggcctcccaaagcgctgggattaaaggcgtgagccaccgcgcccggcctactttgtcttatgttattcccatttgccgtctctgttccttatacattatgctttttcaactttaccagaatcacttggattaaaacccgtggatttctcagtaggaaatgttcatgtgaagacacttctgtagtaacagaacctacagctgctcctgtagaaggaagttgaaagtcatcccttcaagaaaggggctcctccccttgtaattctactgggttttgcatccagactgagtttccttccctcacccacatgaagtgtctaccttctgcagactccaatggctcaggaactgggaatgcagtgccaggctcgtggtatcctgcagcagatgtggggagttttccttctttatgtttccatgaagatgggaggtaagtctcaatctaatagcaaatgctgctgggagttttcaaaacgattttctttcagctaaatgattgccatttctgacactcgtaacaaaagtgtttcttaatagatattttctttatgcggtgctaattgttattggatatcaaataataacgactttgctgccatttatttctaagaatctctccttaatggcaattcttttgtgaccacatggagacatcgtttttaatgataatgggtttccaggagcgctgccctagtaacagtcatgtatcttgtcttaggcactacaggacaaaacattgaccagcccactgagatgacagctacggaaggtgccattgtccagatcaactgcacgtaccagacatctgggttcaacgggctgttctggtaccagcaacatgctggcgaagcacccacatttctgtcttacaatgttctggatggtttggaggagaaaggtcgtttttcttcattccttagtcggtctaaagggtacagttacctccttttgaaggagctccagatgaaagactctgcctcttacctctgtgctgtgagagacacggtgactatgaggcctctttagctgcaccaaaattcaaaaggcaaccacagcagcgagaagctgtatttcctgagtgtatgcctgctgtgagttaagactggggactttggaaccagactgcctggatttgagtttgctactctctagttgggtggtcttaagtcagtcactatttttttttcttttggtttatttccttatccagaaagtgagaataatgagtatctacttcacaagcctgttgtgagttatgactctctgtatcatctatatctctatctatagctatatctagtgttactcagagaagtagtggcacacagtaaactttatttaagtttagttatttcaattctagtcttgaattttcactaagtattacgtggtaggacctctgagactggaactcagtatttctctacccttggtttgtggaaggtgaaatcctgaccactatttgtatcttgtggatctaaagctccacctaatgatggagtttgtcgttcaggtggattgttgctttggaaggatcactgtggtgatactcattttctttggggggactccgaactttggaaatccaaatgcaaatgcttcagagtgagatgttaagtagcctgattaattacgaaaggctatcttcattatgtgcatcctctataaataaatgtaatcttaacatattttggaggtttataactcagactagaagtgaagtttaggggcttcagacttggggagcatgaacataatcaggggagtctatagaagatgggaaaaagagtgaacataaacaatttggtggcaaatctgggtgaggcaggagagccagtaggagattcctatgacaagatgcagtcagtaggcattaagcacaataaaaatttacagtaaatgttaagattttcatttcctgctttataattcccttatgttctcttcaaatcttttaatgaagtctgttaaatgctacaacttgctgtcagctaggtttagagagtacacgattgctgtgtggctacctccacatgagataaagccgatcagagtgcagaagctcagattgcaggttattgggacatcaaaagtgagggctgctccaagttaacatagttatatggccagtcatatgttacatatatatatattttttgagtcaaagattaagcaaaattctctttgggtgagataggagtgctttttcattctaatttataaaatgaacatttgaggtggaatttgaacagacatagtcacactggaaagtaatcttgacaacatgaatccaggccactgaaatgttcatgttccttttgtctaataattcatttttttgagctctcatttaaataaatgcaggctagaaatgaggctttgtttttttccagtttacaagacaaccaaagaagccatagaaatgatatttaagggctttggacttggtgagtatgaattgttcatatagttatcaattagggaaaacaatactatgcaaatgatatggtgaatgctatgatcaatggaatattttaaagttgtattagtttctattgctgcataacaaattaccacaatacccatatattagcttgtagttctgtaggtcataagtccaagcaagttcagctgagttctatgcttagggcataaccatagtaaagtcgaggcattggctgggtgagtactcaagtgctcacacagagttcagagtcctcttccaagttaattctttaaatttttttctattatatatatatatatatatttttagacggtgtctcgctctgtcacacaggctggagtgcagtggcgtgatctcggttcactgcaagctctgcctccctggttcatgccattcttctgcctcagcctcccgagtagctgggaatacaggtacccgccaccatgcttggctaattttttgtatttttagtagagacagggtttcaccatgttagccaggagggtcttgatttccctgaccttgggatctgcttgccttggcctcccaaagtgctgagattacaggtgtgagccaccgtgcccggcctattttttatatattttttaaaatttagagacaaggtgtttctctgttgcctggggtagagggcagtggcatgatcataggtcactgtgggatcaaattcctgggctcaggaaattctctcacctcagcctcccaagtagctagggctataggcacatactaccatacctggctaattaatatatatatttttgtagagacagggtcctgctctgttgcctaggctggttttgaactcttgagctcaagcagtcctctggactcagcctcctgagttgtgattacaggtgctttttttttttctttttttttttttcggagatggagtcttgctctgttgctgaggctggagtgcagtggtaggatttcagctcactgtaacctctgcctcctgggttcaagcgattcttctgcctcggcctcccaagtagctgggattacaggtacctgccaccatgcctggctaattttcctatttttagtagagacaaagtttcatcttgttggccaggctggtctcgaactcctgacctcaagtgatccgctcgcctcggcctcccaaagtgctgggattactagtgtgagccaccatgcccggccagttcttattattgtcagaattctagtccatgtagatgtgggactaaagttcccatattcttaatgtttgtgggctgggggcatttctgagctccttaaggcaacctgcactctttctcatgtgagtcccaccatcttcaaaccagcaatagcatgtgaagttcatctcatgcttggaatctttctggcttaatcttccaaagttcatgtgtttttaaggtctcatgtcaaccggtacatagatatctcccttttgaaaagtcaactgtgggcctggtgtggtggctcacacctgtaatcccagcactttgagaggccgaggcgggtggatcacctgaggtcaggagtttgagaccagcctgaccaatgtgaaaccctgtctttctactaaaaatacaaaaattagctgggcgtggtggtgggcgcctgtaatcccaactacttgggaggctgaggcaggagaattgcttgaacccggaaggcggaggtttcagtgagccgagatcttgccattgcagtccagtctgggcaacagaacgagactccatctcaaaaaaaaaaaaaaaaaaaaagtcaactgtttgttcagcgcggtgcctcacgcctgtaatcctaactctttgggatgccgagttgggcggatcacttgaggtcaggatcaaaaccagcctggccaacatggtgaaaccccatctctactaaaaatacaaaaaagttagctgagcatggtggtgggcacctgtaatcccagctactagggaggctgaggcaggagaattgcttgaacccaggaggctgaggttgcagtgagccgagattgcaccactgcactccagtctgggggacagaggtgattctgtctcaaaaaataaaataaaataaaataaaacaaaacaaaacaaacaaaaagtcaactgtgccatagaacccaacacaatcaccagagtaatattgcataacattcaagattctgaggattagggcagggaatcttgggtctattcactgaaattttacctaccacatagcaaataaaggatgttcattaagactgcataaaaatggtgaactgcttatgatataacaatgaatcaagaaaaccagtgtgcataattgaatatgcggaataatcacagctgtgtaaaaacttttgggcatagaaaaacagggaaaggaattacaatcttccctctttactgcatttcccttactcaaagtcttagtatgggtagattttcttctctctctctccctctagtctcttggctaggattggagggtgcacttccaagatggcttgctcacatagctgttgttggcaaaagtccccagattcttatcacatggctgtagtgtgttgacagagagagagacagagagagagagagagagagagagagagagagagagagtcatcttttatggtccagtctcagaagtgttatacgatcacttctgctgttttttttcccccagcttctaacatttttctccttttacatataacaaagtagaagaaataatataggattcaaactgcaaaagtagttaatcagtagaatgtatacacacacaaaaaatccccataagaagacaggcttatttacaatgaagaaacacatgtacatttaagatagttctcatataaaacatttaaaaaataaaacatatcccacaatgggcaccactgtttacagcaatattaaaggggagaaaacaacactcattttatggtgagcattaaatgtaaaggtacagcatcagtggaataaattcacaaaactatattacagcttgttaatccatttaagaattgttccaaatatatcatatatttggccctcagaggttcattcctacagatttcaactactgtaaatttctagctactgagaggtagaaaatggttattatcatgattataatgattattagaaacacacacacacacacacacacacacacacacacaaactcaccaaggagttacaaaatctatggagaccagaggccaactatcatcacctcatgtctgctctcaccaacagccttgcatttttcagagaactatctaaaaaaatagtcagacaccagtgtgatcactatctcctatgccaaacctattgggaatgaaacaagcagtattaccataaatgagaacattgaggcttacctttcaaggcttattctggtctcagaaattaattagatacgattattttctattgaaatgaattttagctaacataaaagactagtcctttactagctggtcttagggtaaaggtcgtacacatgagtcttaacctactctctgtcatagctaaagtcagctgaaaatccaaaattaaaagtatgccaaaaatcctaagtacaatcttttggaagtctgctgtgaaaaagcctttaaggatgtactaacttgaagtctaagtgcaaggtcataagagctctaacgctgttagatcttcctcgtttgggagaaaggatcaatgttccctacaaaacgctaagttttgcataaaggtgaaacctacatatactagggtatagaattaatttaattttgttccatcaggatcctttttccatggtaaaaaagcagaatgaggaatgaaggaatgaatcttttttttttttttttttttgagactgagtctcgctctgtcgcccaggctggagtgcagtggcgcgatcagggctcactgtaagctccgcctcccgggttcacgccattctcctgcctcagcctcccgagtagctgggactacaggtgcccgccaccacgtccagctaattttttttgtatttttagtagagacggggtttcacagtgttagccaggatggtctcgatctcctaacctgtgatccgcccgcctcggcctcccaaagtgctgggattacagccatgaaccactgcgcccggccgaggaatgaatcttaattggcctcttcatcagaagaggtaaacttggtctctgtattcatgaagctagacagttttttaagcaggcagtggaagcagacagtagaacaagattcctgtagccacagaccactacctggtatcaaactaaagcaaggatcaacttaaacaattatccaaagtcattttaactgtactaaagggtaaagttcaccactgtattattttaaaggaagttgtttaatgtaagaattccattaaccctgggtgagaaaaatcaaaacaagtcatactctctaatgagttatccatgtaagaccaccaataaaaatgcttttaactgtatttgactcgaagacacttacttggtaagtgtgaatttctttcttttttttttcttttatcccattggatttagactattgaataattaagggtagagtgagggagaacaaagagctacttctttaacattttagtatctggatagtatagcagaaactgttcctagggacaatgtatatgccattaatcacattgaataaagtggatgaattattcatttttcttttctttttgttcgagaagcttgtttatctccctttggcctttccagtgtggtttgaaatgattccgtgttggtttagttgaggaagcaacagtaagaaagtcactgtcaggtagctgagaagcaggttgtggacttgctgtcccatccaaacaactgcagcgagataaatgatcatggccatgaaacacatttcaggcttttcttccttcagtgcgaagatttgtttccaccagtccatagctctgcattgagtttttagtagattgctgcaaatttcatggaatttttgctgttgattgctggtgcatttattggagccaaaaatgttaggtgctagaatgggaacaaggtagtcagccaagcaccaaaacacaacaaaagaggaaacagcagacagaacagatggatctagatagtagataattgaagcaccaaagaaaccaagtccatgatggcaggtgaaaaccaagctctttcccataataagactttatccaccatcaacatcacttttccccattcttgcagctattgttctaaacttgcagtctctgcagccagcaaattggtgccgtggttacctccctctgccatcatccctgaagtgctgtctcagcaagcacaaaccaccctccaactcagccttcctcctgagatccacagggcgattctggccacttctgctgtattctgttggtcacacagacccacccttatacagtgtagaaggcgattgcacagtggtgtgaataccagagatgatggagatcattgaggtcatcttgttgactggcttccatttaccaactcctgtcagccattggttgaaggatattaattttattaattaccagggatattaattttctagtattcagggtttactatgtacatgggcaaagaaagcgccagttgccagaaagatcccctcaggcacagaggtgctgacagttgaaagttgggccgtccatggaaaatgtaaacgggttatgcagaggagggtattgatagtgtcagtcaacccttccactgctttgataccctcttacccaacattatatttgctttgtactgtcattgattcctcaaggtggtggctgattacagtttcttaaaaaaaaaaaaaaaaaagacctaaaacagaggatttagccagataagtagagttgttgctgcagttggtcccaagaccatcactgttatctattgtctccctcttctatcactcattctaggctccctcattcagcattcctgctggtctcagtttcttgctctttggtgactcagaccttcatccctgaagggcccaagcccctggttactgtacccttttcagaccttggttgatgcaattacctcttcactgctatcaccaagcatggaaacaccaagacatgttccaatacatctctgagttccattggtacttctctctatccccgttacatagtagcaactctatatcctcatgatagtagtcaattacctctgccactatagttttgccaaatttggggagttttcaggcattatttctttgaatactttttcagtcccacttctttcctcttaaactccaatgatatgaacttagatctcttgttattatcccataggtctctgaaactctgctcatttttctttcagtctattttctccctgtttttcaaactgagtaaattctattgatctgtttaaagtttacagattcagttctctggcatctcccctttatattaaatctatccagagagctttttaatttcagttattgtatttttcagttctctggactcagctgctgcctcaaattcctgggcttaagaaatcctccttcctcagcctcccgagtagttggaactacaggcactcaccaccacgcccagctgattttcaattttttgtagagatgggatctcactatattgcccaggctggtctcaaactcctgggctcaagtgatcctcctacctcagcctcccaaagtgatgggattataggcatgagccaccatgcctggactcacttattgaagcatttttgtgagagctgttttaaagtccttttccaataatttgagcatctgattcgtcttcgtattgaatcagttgattgtcttttctcatttatgttctgatttcctaattcttggaatgaaaagtaatttttgattgtagcctggacattatgggttttttattaggaaacctggatcttatttaatcttctttttagcaggtagttctcctgttgagatgtagtgtaaagtttggtgaatatatatgttcagtttcctgctgggtgccactggcaccaccccaccaaaaggggaccattaagtcacattgccttattgcctctgaatggagatgatcagctttctgctgggccagctggaagaggggaaaggagagggccaactagacttacctcctgcctggttggtatggcaggagtggaggcttagctcaccaggggtccttgttgacaagggagtgggaacaggaactctgattagccctgctttccattgctttgttcaattacatggccactggatgggtgtggaggttcagctcctcactgggcattgctgacattggggtgggggaagctgagtgtttactgtctcacctcatagcacctcattctacctcattgttgctaggtagagatggaggctcagctcattgttggacctcactgacagtatcttgctgggagactggagcaccacctgcttctgccatctggggaatggaagatcagctccctgtttggcctgctgacactaccaagggggaaaccagagtgcacagtggcttctattgggaaggaaggtggggtggaagatcaacttccttgctcactgactgagacctgggggtgtggtttatttgttggtgtttagctggagcaggaagggtattgccagaaagatttcctgctgttaggccaccgcctttttccttgtcctttggctagaaggaatgggctttccttggagcttttgttatctatgcatattggtgtctccaggttggaggtttctgtaacatcctgtccagaaatttttttgataaatattagggtggtatattatttttccttttttaaaaattctaatgtagttattgatatgattggtttaaatctaccattttgtgatttgttttctattttccccatttcttctgtgttcattttctttcctttttggtctagattgagtttttttgtatgtttgtttttgggttttattttagtatttaattttatttcatcttcactataatcttattagttatattactttatgttagctgttgctctagaatttagattatacatctttaatatagtataacttcaagtgatattatatcatttcctgtatgatataagaaactttcaaacttctgtttttctcctcccaggctttttgttattactttaatatattttacttctacatgttataaatttcacaatatatttttgctttatatagtcaaaatatttaaaaagcgatttaaaaactgattataaaacactttgatatttttgccttacttataaagattaccttacccagacaacctgtaaagtgtggagaatatagatttatagatattgctttgaacatctgcccaagcagtagaagaggcaaattaggaagtgtttagcaagatgcttctggaagctaagttagttcgaggctgtatatcaggcatcctgggtacccactgactggtaccaatttacttagtgttcatgggtgaggtttcacttgtccatggactttgaatccctggtgtgtatgcagtggttattacagtggctctacaaactaatgtcatgctaattgccaaaggtttggaactcttccatatttgaaggcttctggattttttgtccacttattaaatggctaaatgaatgagactaataacaggaaaggcattggaatggaaaacttttaataatacctccgagtattcattgatggcaagttcagttatgtcatgtgatgatcacttcaaaatcctgtgtcagataggtaaaaattccaaagctttcaagcctaaaatttaccctgtgcagaattttgagtttcatgattttatatcctaggcttctataatagggtatcagaggcgaatggaatcattagaggagatacagagtagatggtaagtgtgtgatatatattgagaacatttattttaaacaaataagatagatagtttttatgtataaacaaatgttactgattatacattgaagaatattgctttggactttagaagacagcctaagcttaatagagctcctgggttgattgatttgattttatgatgctgagttttgctatcctcttcctgcctcacctttataatgtgatcatgattattgttacttatttaaggtgggtgctgaggtgaggagaaaggagataataggctctttaagaaaagcttatctcctgagagtgataaatgtacagtggtcttcctaaacttcaccacagtcccatcttgatgatcattgcaaagaaggtaattatattagtcagagttctccagagaagcagaaccaaaggttttacacacatgcacgcacacacacacacgcatgcacacacacacacgcacgcacacacacacatgcacacacacgctgcatgcacacacatgcatgcacacacacacagatgcacacacacacacacgcatgcacacacacatacataaattagtcctttggtatacatgggaggattggtttccaggatgcccctaccaatagccaaatctgtagtcatccctgcagaactggtatatactaagttgaccctccgtatacatgggttttgcatcctgtgagtgctgcattttcaatctgcgtttggttgaaaaaaaatctgcgtataagtggactcagttcaaatccgtgttgttcaagagtcaactgtgtgtatatacattatatatataaaatgagagagagagagagagagagagagtcagagatagcttgatttattatgagactgtggattgtgggtttggaaagtttaaagtattcacagcagggctgcaggctggaaattccagcaggagttactgttgcagtcttgaatctagaggcagtctggaaatagaattctttcttcttcttaggacctcagtcatttttcttaaggccttctactgattacatgaagcctcgccacattatggagggcaatttgctttacttgaagtctactgatataaatattaatcacatctaaaaaataccttcaaagcaacagctagatcatagtttgaccaaataactgggtaccatggcctagccacgatgacacagaaaattaactattatagtaattaaagggataaaattattacctgcattccataatgaaaataaagagacttgctcaagtatacgcagagtaatatatgagttggctaaaggagcaaaaagaagcagaatccaaatttatatatgtatattgacaggaaatatgctttcatttgacaatatttattagttctgatgcacaagaatagactaagacaaattggctttgatttgccacagaccccttaaaaatttttgtattttcttaccgggccccatggctccagcctataatcctggctactcaggaggctgaagtgggaggatagcttgacaccaagaactcgagaccaacctgggaaacatagtgagaacttgtctctaaaaaaattcaaaacaccaacaaactagccaggtatggtggcatgtgcttgtagtcccagccactgggaatgctgaagtgggaggattgcttgagtccaggagtttgaagctacagggaactatgattgcaccattgtattacagcctgggtgacagagcaagactctgtccctaaaaaaagttttaaaaattttcttaatacaaaactttaagcttaatgttagtatcaagttatatcccctaaaagtgtgctttctgttaatatgaactaaaaatgaatactttttttctataaaaaaatttgttgaatgcgtcttaaaatgcagttccaatggtgcccatggtagttactgattaaagtggtaatggcaagtagacgtagttctgtcttagttggcctgacaaaagtcaaagtattgtaaaggaaaaatgtaaaatttgcagaaaagaaaaaggattaaaaaaaaccaaggaccaatattaaaaaggcgaaaccgctgggcgtgatggctcatgcctgtaaactcagcactttgggaggctgaggcaagagaatcacttgagcccaggaatttgagaccaaccagagcaacatagcgaagccctgtctctacaaaaaaaccaaccaaccaaccaaaaacaaaaaacaggaaacacaacaaaacaaacaaccaaaaaaaaaaaaagcaatgaacaaaaaaacaaaaaattagctggacatggttggtgtgtgcctgtagtcccagctacttgggaggttgagatgggagaatcgcataagcccaggaagttgaggctgcaatgagctgtgatcatgccactgcactccagcctaggtgacagagtgagactctctctctctctcactcacacacatgtacacatacacacaacttaaaaaggtgaaactgttcaaacagaaagccagttactaatatccaaatcagagtgtattttatttcatgttttttaggattttgctttttctgtttcatttctagaaacaattatgagaaaagtgaatgaaataacattatagtaactttataacaattagctaaagcatccctgcacaactggagaaaactggtaagttttaccactacctgcgctgcttgtcatgctttttgtgggtctgcacatgtatgctcatatgtacattacgtacttggtattgagcaagacttgtctgatatgtcacttaagtgtgtgtttagaagtttaatagaagaccttttaatttatgagagttgttttaacctcttttctgtctaaggaatcagaatacttttttaacatgttgctgcctatgaaggcacctgcacacacagacaaaacacacatacgcacaccctccaggattcctcaagatgtctggggttacgacttgtcacctttagagtttgccacagcactgatttctttttcctagttatcgaacactccgtaggttatggagtcttgaggttgtaagggatcaagaccatcacttctgtttgctttttggatttgaatacctagaacagtgcctggaatatagcagacactcacacataattataggatgaatgttgaatgttgaaaagatgaagtcttttttactggcagatggccattcagtctttgtttctaagagcaaggaagtccttacgcagcaaacctgtgctctgaaagtcagtgtacagattagttttgggctgttctggagaagatttggaggactacagttgaggcctggtagctctgctcctctgggatttcttaccctgggtcactctttgggacataactcaccatgactacatcattgtaatgtatggagttgtgatgttaaatgcttccttccttccttccttccttccttccttccttccttccttccttcctttctttcttccttccttcctttctttctttctttctctttctttcttctttctttccttccttccttccttccttccttccttccttccttccttccttccttccttccttccttctttctttgtttttctttctttctttctttctttttctgtctgtctctctctctctctctctctcccccttcccttcccttcccttcccttcctttctttttttaacggagttttgctcttgttgcccaggctggagctcggtggcacgatcccagctcactgcaacccctacctcccaggttcaagccattctcctgcctcagcctcccaagtagctgggattataggcatgcaccaccacgcccagctaattttgtatttttagtagaaacggggtttctccatgttggccaggctggtctcaaactcccgacctcaggtgatccgccccctcggcctcctaaagtgctgggattacaggcataagccactgcacccagcctctaaatgctttctatgtatgcagaagcaaggacatcattttgttcttaccctacacaaccttcagctctaaaactttcacagcagttttttttttctcagagatttctttcccagttttagttggtaactgagtagatggtctcctcatacacagagaagaatcaaatctttaaaaaataaactaaatttaatatgctgaaagggatttaggagttaatccaactcagctctctgcagccaactattgagtaatagaaaggcctagggacaggagaattgggacagaattccaatcttgccatgcaaaagctgggaaagccacaaaacacctctgaagcttacctgcatcccattttattagggagatgaacctgtcaaaggttagagcgtgttcctatgaacttctgccttgtctcttcttgagggtttaagccctggcattcaatcagtataggcagttctcttatatcagatccatctaagcaagaccttggaagctctggattttacaaatccatttgaggctaacacgataatggtctactgtgatggaaaatcatgttccacttggcaaaaggagccttctctaagtaacacttctctaagtgggtccttgccaaggattgagcctttagtgctgaaagagagatcaggtagaaacagagacaagaggcagagaaagatagggttggaggtatcattgatgaaaagtaaagatgagtaggctgaaactggggtcagggagtagaggtcactgatctctggaaagtcacgatactcttcagaggtatgatttcaaaaaggggaaagttgttgctgtctacattgtggagctgctgtgggaactctagagctcttggaagaaaggtaaaaaaggtagacaaagagcaggaagagatagatttcattgaccttcagtttttttttttaaatgaagaattctaatatacgcagtatacaatacacaatactgatgtctagtggggattctggtgcttttagctcaattgcccctttgtaaataagatttctgctgattgccttaaaatgggtaattattttgatgtacagatcaacttacccccaaatttttggatttttcataattcttccttgcagtgctactttgaaaatatctttaaaaattttatttattttatttttagacagggtcttgatctgttgcccaggctggcttgcagtggcatgatcatagctcactgcagcctcaaactcctgagcttaaatgtttctcctgcttcagtctctggagtagctaggactatagacatgtgccaccacactcagctaattttaaaatttttgtagagatgcagtgtcactatgttgcccaggctggtcatgaactcctggcctcaagcaatcctcttgcctcagccttccaaagtgctgggaggctgaggcaggaagattgctttgtcctacttttaaaacattaaaaaaattaattcaataagtattcagtgagttcttcctttatgccagttactttgctctgcggatagaaaaatgaatgagatatttcccttccttcagggagtgcatagttggatcttattgctacttaaatcccactttatgtttttttcttttagttctttggttaagaacgtaggctctgaaaaattcaaattccattttagccagttgctgagtgaccatgagtgaattatttaatcttgcaaatattttgggaagcaatttgataataatatattttgaggtataatctttaagctagtaaactcatttctagtaatctattcctaacggaataatatattagagaagttataatcgttcaaaaatatgtattgagcaactgctatgttctatatactttcctagataatttggatgattcatagagcgaaacaaagatccctgtccttttagaatttatattctagcagcaggagaaagaaaataataaacaatagactaaataagtgaattatacagtatattagaaggtgatcagtgctttcaaaaaataaaaaaggtagatcaggataaaggggatcaggagtgctggaattctcggtgagttttagttttatattatgttcatcagcataaaccttgttgagaaggtgatgtttgagcaaagacatcaagggggtgagggagttaattatgccagtggtccccaacctttttggcaccagggaccagtttcatggaagacaaatttttccatggactgggggtgggggcgattggtttcaggataaaactgtttcacctacatcatcaggcattagattctcacaaggagtgcacaatctagatccctcacatgtgcagttcacaatagggtttgcgattgaggatttaatgccaaggctgatctgacaggaggcagagctcaggcggtgatgctgaagcactcacctcctgctgtgcagcctggtacccatctgtggcccaggtgctggggaccccagaattatgggatatctgggggaagagattccaaacagaggaagcagccagtgcagtggccccagagtgggactgtgttttgagtatttgaggaataccaaggaggacaacgtgattggagctgaaaggaagagtggtaggagacgaggtcagagaggaaatgggaagttgtgtcattgagggctttacaggccaaagtaaagacttcacttacaatgtgtgaacagggagccatcgaaagtcttcgaattagtgaaatgatttaatctgatctattttttttttttttttaaagatggcatctcgctgtgctgcctaggcagaccttgaacttctggacttaagcgatagatcctccacctcagcctcttgagtatttgggactacaggcacgtgtcactgcacccagcttgacctatgttttaataggatttctcactgtaatgttgagaaagattgtaccattatttttaatagtgagaaattagaaacatcataaatggccacaaaggatggactgggtgcacacatttgaatacatatatgtgatgaaatgtcacttggttatacacttatgatataatactgagtgaaaaatagaatataaaattatatgtttataatacaattggaacaaattaaagataacagcagtaggataagaacaagctatgggtattcttctcacttgcttttccctgtgcatgcttttaatactttgttttaaaacaaagtaacccatgcttattatacaaacttgaacaattatgaattataatgtaaaaattaataaaatcctatcatttccttcaattccatacttctagaattaactaatgttaaaattgatgtgtgttcgtcaacaactatcttgtgtccttctaggaataaatatatacaaacataattcatgaatatgtatatatgtttgaatatgtataaatattaatatgttgaagcatatgcacgtacatatatgcgtaaatatatatgcatacacacacaaatctttttcgatttctttcttcctttgttcattcattcctttgtccctcccttcctcactccctgccttctttccttcaaggttcgtaatatactcataataggttcttttgcttaacaatatgttattgacattccatgaattagtagtttgtaatcttggctgcacactggactctccaaggagtattaatagtgctgatgggtccaattgtcagaaattctgaattgatggtttggcatgaggcctgggtatcaaaatttataaaacttctttaagtggttctaatgtgcagccacattgagaaccactgccttaggttatacatatagatccaactcattattattattattcttaatagctcataatattccatactgtggctgtactaaaatgtgtttatctagtcctctattgagaaacattcagtttgtttccagtatgttattctactaaaaagtctttaaacatgtatctttagttctttagttaccagtttctttatttctacaaaatacagtcctataagtaaagttgctgggttcagaggtatgagtgtttaaaattttaattggcactgctagattattttccaaaaagatctcaataatacctacttctagtagcagtgttaagagtactcctttccttatatctttgttaatccgatgaatgacaaaaagtatttgattttctttttaatctattactaattaagcatatttttattcatacttatttgtcatttgaagttctttttctgtgacttaagtatattctttgctcatttttaattgagtcgtttgtcttttcttatcaagttttaagagatcttggataacaggagtagtcttttttggttatctatgttacaatattttcttcacgtctaccttttttttgataatttatatggcactatatattttgttattattattatttttttcagacggagtcttgctctgttgcccaggcttgagtgcactggtgcaatcttggctcactgcagcctctgcctccctggttcagttcaagcaattctcctgcctcagcctcctgagtagctgggattacaggcatgcaccactacacctggctaatttttgtatttttagtaaagatgaggtttcaccatattggtctggctggtcttgaactcctgacctcgtgatccacctgcctcggcctcccaaagtgctaggattacaggcatgagccaccacgcctggctggcattatatattttaaattattgagaaagtttaacacgctttatctcatttttattcattatgtttaatattttttcacgttggtaggcctttgtcactattgttcctaatgtaagccccatgacattgttcctgatgtaagccctgtgaactactgttcctaatgtaaacccctaatgtaagcctcacgttattttaaataatactatagttaatatttccttgcatttagcttttttcatagtttgaatgcttacaagtgaaataattggatcaagaatataaattatttttgtggtttgtgataattatttcccaacggttatagtttttggccagccatcagtataaaaagttagggtaatataactttagtatttatacaataatatcatattacgtaatttaaagaagtaagtttcttaagtattttcttagctccattgtgaaggaaggcttgagttctttttcaggctgcctaagaagttaggttcagttcaagtaaaaattgtttttgcatacccattgtgtacaaggcacctactaagtgctgcaaaggataagtcctgtgtggttactactcttaaaaaaattttagtctgggcgcggtggctcacgcctgtaatcccagcactttgggaggccgaggtgggtggatcacgaggtcaggagattgagaccaccctggctaacatggtgaaaccccgtctctactaaaaatacaaaaaaattagctgggtgtggtggtgggagcctgtagtcccagctacttgggaggctgagataggagaatggtgtgaacctgggaggcggagcttgcagtgagccgagaccatgccactgcactccagcctgggcaacagagcaagactccgtctcgaaaaaaaaatttttttttttgatttagtggagagcaaaaatgaacatcttattttactttattttacaggtcaaggaccataaaagaagcctgagagggaatagataggctttgactgggtcaggaaagttttcttaaaggtagtgttctttgaaatagtcaaagacaaagtgaaggatgaatagtatttttttcttcacctttaagttcatggataagtgtgcaggatgtgcagttttgttacataggtaaacgtgtggcatggtggtttacagcacagatcgtcaggtattaagcccagacctccacaggtgtagagtgggtccacgtgttctcattattcagctcccacttataaatgggaacatgtgatgtttggttttctgttcctgcattagtttgctgaggataatggcttccaagtctatccatgtccctgcaaaggacatgatcttgttcctttttatggctgcataatatttcatggtgttatgtaccacattttctttattcattctatcattgatgggcatttaggctgattccatgactttgctattgtaaacagtgctgcaatgagcatacatgtacatgtatctttataattgaataatttattttcctttgggtatatacccagtaatgggattgctgggtcaaatggtatttctggttctagatctttgaggaatcaccacactgtcttccacaatggttgaactaatttacagtcccatcaacagtgtaaaaatgtcccttttcctccacaacctcaccaacatctgttcttctgttgttttttggctttttcataatagccaatggtatctcattgtggttttgatttgcgtttctctaatgatcagtgatgttgagctttttttcctgtttgttggccacataaatgtcttcttttgagaagtgtctgttcatgttctttgcccatttttaatggagttgtttgtatattaatagtaaacaatgaggtgaggagagtacacttgaatagagtgtatgttttctgagcagagggaaaagaaaaagtaaagacaaagattttggaaggtaagtaggtggaggtaggatgcctggaggacagtgacttgcttggtcggagagaagaattaatagggagaataaaaggacactcacattgaaaaaatgaaaatgtgcatcagactgttgcaggctttgaatgtatatctaatttgatagaagagtcaaattatttagttgggagttgtattggaatattagcttaatgttatcagtgctttagtttgaagtgaaaagagccaaataactaatgtgtaaggtttcgggcatttatttattcttgtaaaggctcactgatctcatctgcaaggcagaaacaattgattcatgtgccatagggtggttgtgtttaaatagaagtgcctggcatggctcctggtaagtagtgggtatactgtaacaactactgttaaattgatttcataagctatatgctctgatgataaataagcaattcagataagaatacaaagtcatttcaattagttctattcctataataataaaactaaattagctttcattttttcccccctaagctcattgaatggacagtctaaaccaaacaagagtgactgaatttgtcttcttgggactcactgataaccgggtgctggaaatgctgtttttcatggcattctcagccatttatatgctaacgctttcagggaacattctcatcatcattgccacagtctttactccaagtctccatacccccatgtatttcttcctgagcaatctgtcctttattgacatctgccactcatctgtcactgtgcctaagatgttggagggtttgcttttagaaagaaagaccatttcctttgacaactgcatcacacagctcttcttcctacatctctttgcctgtgccgagatctttctgctgatcattgtggcgtatgatcgttacgtggctatctgcactccactccactaccccaatgtgatgaacatgagagtctgtatacagcttgtctttgctctctggttggggggtactgttcactcactagggcagaccttcttgactattcgtctaccttactgtggccccaacattattgacagctacttctgtgatgtgcctcttgttatcaagctggcctgcacagatacatacctcacaggaatactgattgtgaccaatagtggaaccatctccctctcctgtttcttggccgtggtcacctcctatatggtcatcctggtttctcttcgaaaacactcagctgaagggcgccagaaagccctgtctacctgctcggcccacttcatggtggttgccctcttctttgggccatgtatcttcatctatactcggccagacaccagcttctccattgacaaggtggtgtctgtcttctacacagtggtcacccctttgctgaatcccttcatttacaccttgaggaatgaggaggtaaaaagtgccatgaagcagctcaggcagagacaagtttttttcacgaaatcatatacataatgggcattgggattgcagacataattgcagccacatccttaatgaaagagcaaaagtaaagagtcaaaatcaacttatataacttggtaaattaggtaaaatggcatagagcaggtcagatttctgctcattaaagataagaacttattctgttcattaaagataagaacttattaactattatttaaataaagcaaaagatcatagtggaagttataaggaaaaataacgtgggaaagtttaaagacagcttttgatttcatcagtaaaagaatacaatttggggaactcagttcagtctcagtttcaggagcaggtagagtgagaattgactctcttgatttatactgttctgtgggctattgcctctgggaagctatacatcactcctgtgatttatacattatagtagtttcaatcttgttttccaatatattttcaagtgtataaataagcctttacttatttatattgaattaaacttttgttgcttttgaatgtaattctctcatgtctagatctattttgtactttttttttgagacaggaattttttgtactattcctgcaacttcctgtaagtctgaaattattgtcaaaataaaaagttaaaacaaaacaaaactatacacccacaagaatagtaaaaattaaaaaggtagaaaataccaagtggttttttttttttttttcctaattactctgtcgcccaggctggagtgcagtggcgccatcttagctcactgcaacttccacctccaggtttaagtgattctcctgcctcagcctcctgaatagctgggactataggtgcatgccatcatgcctggctaatttttatatgtttagtagagatgaggttttaccacgttggccaggctggtctcaaaactcctgagttcaagccacctgcccctctcagctaatcattaactactatcactcattgggctgaagtatatcagtttattgtggaatgggcaagtccatatgaagagggatccatgacaaatttcttaggtaatgatgatgatattctgtgactgaaataagtaggattagctgtaaatgaagatcctatagatggtcagagagctaccatacaatatcaactttaatggagctgatggaatgaaatgaaatatggttaataataaaaatattaagtataaatatgtttctttgcttattctgaaaaaaatttataattgattggggtctttgtcactattttccacatggtctgtcaacttatagaaataatacttgagtattctggagaactggagagcagacaacatagccatccacacattacagacatacacaatacagagtgagtgacccactaactctaactaaagagtaatacatgattaccttttagtaatcaaaaggacaaagaatcagaagcagtctattcattaaactgagagatgctcatgaaaatatctaaatatcattacttcaagttgacaaacaagggtagaaaatggtcagtcccctataattctcatataaaacttgagtcatagtaagagttttagatatctatgatgaaatgaagtccagatatcactactatgtacatgttaaaaacttagaaaaatgatctaattatgcctctagtttctggacttttatgtgcataagtattcatactcattaatatcttttatgcagaaataaattcccactgtcttatttgtttatttgtattatggcactattcattattttaccgtatagaacatggttgtaacctgaagaattcaattgttgaatacaaagttgctgagcagatttctatattaataaataatgattcctctctcctgttaaagtaagtaaaccacagagccaagcatcaagatcttttatttttgttctttaagactctctatttatttagtgagtaattaaatacatttttatcttgtctctgagtctgaaaagcttttttctgtaaaacggagacaaaatgttttatttttacgtccccagagagttgaaaaattagtgtgactaaaaacgggtagtgtcagaaattttgcttgctgctatgaaaaaaataagcaaacatcacaacgttgttccgttatagttttaccagctacaatcttaatggctacgttgaagcattgtgttgttgacagacaatatgacaattttgcacgtgttcctctgtatggctgattcctgcacaagcagttccatttgggctcattggaaagatatttagatatttctccttattgtctgccattgcctataataaaagggcatttattttacataaattttataattcttgtgtcacttgaatatccttcctaacacatttcctagcaaataaaaattttcctcctaaaaatcatgatgtagaccttgtggctcacaggtttattgatcatacactcactgagtgcctaggaaatcccagctgcatttaagcatgcctttttagcgatgatgtgagaacaaactgatgatttccaatgtgtcatgctcttttgtaaacatgaatatgagatgccgttatctgggatatcctcttcatatcccagttgattcaccacattccattctgctacactatgtgccgccacagtgagatttaagatgttggtttatagacaatggtttatccaacttggtgttttctaccaagtttctaccaagttgttttctaagtatttatgactaagtacttaacagtcatccattgctctaagaacaatattggatgctgttgcttagttgagtgaattctctacataataactaaaataattttattaaaacataaattatttcatgccacacctgtgcttaaatcattctggtggcttcttattgtactggaaaagattctaaacttcttgagagaatatggaaagattctttttagctctctgatatcactctcttgccactctctgccttatagtctaagctgtaatcacactgatcatttacttccttgaacaagccaaggtctttcccagcatagatctttgcaccggccatttcccctgtctagaatgtccatcacctctcttatggctggctccttttaatcttaaatgtaacttcctcagagaggccatccttgaccactaaagcaagtctcttccatactctctaacagcaccctgctgttttatagcatttatcacaatctgtagttaaaatttatttgttcatatttttgttttctattttcactagaccctaaactccatgaaggaaggactacatgtatgtcttatttatggctataaacctagtatctggtacataataagtgctcagtaaatatttgtcaaatgaatgaatagtaagatatccccatttcattgctctgatggcagattttgcctggatacttgagagtgtcagtaacttcacctgttcaaagtcttctttctctgtcaccaaagtcatgtggaaactcactttatctgcttcactagtgtttgctaagctgtttacataagcatctgagtgaatgatgcaggcaagggctgcccagaaatctgaaggtttgtttagaccttggttatcactccaacagaaaagcagaaagaggcagcatatgtcgtgaaaagagcttgagtttctgttgatccacttggattcacatgctgccttcattgttttctagctgagtgactttgggcatgttatttactctcctcgagctttagtttcttcatgtacaaacaagcatcataatatctacctttcaaagttgtgagaattaagtaaatgcacagtgcctagaataatttccagcacagagaagatattaataaccataacgattgctatgactgtcagatattggaccaaggatagttttataagtcacatagtctgataaatatggtatgtaacttattctttgcaaggcgcttctttaatttggagcaccacgtatcctaaggacgtagacattttcatttttcttcttttctctcttttctccccactaacttgtttaaggcactcttcatttcttcattcctaagggtatagataatggggttcagcaggggggtgactgcagtgaaaaacacagatactgccttgtcctctgggaggctggtggatgggcgggaatagatgaagatgcagtgtcccaggaacagtgtaactacagtgagatgggctgcacaggtggacagggccttccacttgcccttggagatctgctgcctcagactcaccaggatgactgcgtaggacaccaccaggaccacaaaacagaccacggagatcaatccactgttggagacaatgaggatctcaaggacgtgggtgtgtcaatgcaggccagcttgatcacctgaggtacatcacagaagaagttgtcaatctcatcaggaccacagtagggcagcttgatggtaagggaggtgagggctatggagtggatggtccctcctgtccagagggccacagccagcagcacacataccttccagttcatcactatcatgtactgcaggggtttacagatggccacataccgatcataggccatgacggtgaggaggaagatctctgtgcaggcaaagaggtgcaggaagaacatctgggtcacacaggcatcaaaagagatgagcttttcctctgaccacacgtctctcagcatcttggggacagtgacagtggagtggcagacatcaataaaggacaggttgctgaggaagaaatacatgggagtatggagccggtggtcatagataatagttatgacaatgagaacattcccaatcagtgtcaggacataaaaaatgaggaacatggaaaacatagctatccgtgccttatgatttacagataaacctctaagccgaaaatatgtcactaaagaagtttgattgagtaggatggcctcttccattctctttgttagacaacctgtaaagaattagaaaaaaagtctaatataacacagtatctgcatcaatcatttggtcatttaatttcttgtgtgtttatgccttttctctccatctagaatttatggtaaaatatcttgcatttcttttaaaaatccccattaacatcttacatgatgatacacccatagtaggtacttaacatacacttttggaataataaaatagagaatcttcattcattaagagatataaaacaatcttgaagagggagagagagagggaaagaccaaacaagttatttctccattaatgtagtaggatatcaatgtttagatttaggttatggatttttacaggagaagaagttaagattctctttaactcaaatacataatttgttcaaggctacacaaatatggtccctgaacatagcttttttttttaatagtcctgcagactgcacttttcatcaacccaaaccacttgctcagctgttggctttgccatggggctctgagactgtaatttccatgacataactttcagagggcagaagctttgtaccaagctactggacaattggcaacgtggctgtgatgttcttgaacaattgtttagagaaggcaggataaaaccctggaagccttggaaaatgtggaagttgacctctcctccacccctcagctgagggcagacttattcttaaactgggagtcaagatccaagcctaataacattactgtcttgattagatcactctagctcttttcaaagtcccgttctgttgtcttactggcccacaagtgaaataaaaatagttattttcttttaaattagcctatgactcaagcaccactattttttaaaataacgagtatatgcattatagtcacaggattttagcccttaaagggacttgagagttgacataatctatttttttttcattttacaaatagagaaaatgaggcacagagagtcaaatcaactggtccaaggttacacggaactggagtcacagctgggtctagagctcaggtctcccgactcttggttcaggcttcgtccgctctaccaccactctcatctgaatttttgtggtagttggtagaatcagggagtgaagcagaatatgtcttagtggcctctctcttcctctccttggtgtcctgagtcagattgtggggcagggttagggggactatgaggaatctctcttttctagctttcctccttcatgctgctgccctgacacacacagccttccaggggtggcccacccaaggaagctgtctctcttggttgcttgggccccatgatccttgctacttccttcctatcacaagtgactactggagatttatatcatccctcaagatcaggctccctggcagactaatgagtcaaccccacactgcttgtgaaatgtggcaaagaagatatttttggggccagagaagtccttcagttaacacttaaaaattaaactcactgtgtccagtgtttggattaatatttacagcagcatctaaatgtagctattgattgattttactgtttagaaatttttcttcgagtattcgtttgaagcttttgctccaagaagtgattttaagtgttactgatttacacttgttttcatggtcgcaaaattcaaagccgaagagctgacccaagaatggggctaggattttattcagtatgggaaatttcacctgcacagactgaagagggtgtgcagaccaagaactaggtctgaaatgaaggcttctgttctcccctcatagaatatggatatacattttaaactaaactttttccataattatcatttttttctatttctgtggagccacaggaaaaaaatgctttggaaaatggagatgtgttcaactgcagtagaaagaatatggtgcacaagaagaaaacctagtgttttttgcatacatttcaaggaaatggggaaagatgattaagaacagatataaaatccaactaaaatatctataaaagtcacctgggttgtttctgatgctcttagtacctccaaaagtaacagaagtgtcagtcctgcactttcaatatcaagacttttatcttccagtagaaataacaacttatttgaagttggactagtcagataaccccatttaccttgctttctccaataagaaaggtgagagcccttgaagttctctccttaggtcttgttcacagttttggtgatgtcacagtagatgtatttggcgatattttctggtaaaaggtactatttcaggctgtctgtaaaaatcacacctttgtagctatattattatcatatttttcaatatgtcaaaatatgtaattctgcaccaagattttctaggattggtttccagttaacagaaaatgtagtacagaaataatatatatgttttcacttttccagattgtagtggtgagtagaggagattaaaagccacagtcaagcccgggcaacatggcgaaaccccgtctctacaaaaaatacaaaaaattagctgggcatgttggcttatacctgtggttccagctgctcaggaggctgaggcaggaggatttcttgaacccaggaggtcaaggctgcagtgagccgtgattttaccactgcactccatcctgagcaacacaacgaccctgtccaaaaaaaaaaaaaaaaaaaagagtcagccacttttgcaggcccttcaggtttattaggacacttctaacacaaaacttgatctaattattcagaaaaccagtgcggcagaagcatcctatttcctttgcagcacactgtttaggtgcaagttttgtattgccagtttcaggtggattattccaccttcaagtactgaaggggaatctgtagagaaagaagcgctggcagctgtagtgttggtgttgttctacctacattatgtaggctttatgtccttgggaacttttaagcaatgacatcagcttgccctactcactagttaagaaaagttaattctgtggggaatgaagttacagactttgcaataatcaccaagagaattaaatgagaaaagcagtacttaaatacctaaatctttaggatgtatttatatatggttagattaactactatttagtgattgcctactatgtgctaagtattaggtaataggctttcatgttttcttatttaactcatataaaaatacagagatgagagaagggtaatgaagttaagatttttttttttttttgagatggagtctcactctgtcacccaggctagagtacagtggcgcgatctctgctcactgcaggcgccgttccccaggtttacgccattctcctgcctcagcctcctgtgtagctgggactacgggtgcctgctaccttgcccggctaattttttttgtatttttagtagagacggggtttcaccgtgttagccaggatggtcttgatctcctgacctcgtgatccgcctgcctcggccttccaaagtgctggaattacaggcatgagctactgcgcccagccgaggttaagattttagtcagctttctgacagagagattaagtgctttgactctagagcagattgggtgcaaattccaatgtcctacacgtgctaattggagcaagttatttagcttctctggtccttagatttcccatccgtaagcatgaatagtaatagtaaaactttttagaactcttgaaatatttgtaaagcatgtagctcttagcatattaatataattatgttaaatgcaattcaaacaaacaaaaaaacagccgaccatcactaccagtcaacatttttggcttcattttttcattattttggataacagtgaaaatttagaacctcttgttccaattttctttttgctttctctctttagatagatgagcttggtggtttaaattggtgaaacaagactccaaaggagaggtatgaagattatactttcagtttgaatttcaagactgaatagttttgtgggatggttaggatatcttaaataaagggtatggagcataaaataaatcttatagccaactctccatgtgacagtgagtagaagagaagatggtaataagagtgaacatatcagaagttacagaaaatgctttctcctaaggccttgtggcttgggcttcttttccctagttttcttgtttgattcattatcactgatcaaagtccagacttggctgtaatgaagaaggtgtagcttccagaactttacagatattgccacttggtcactgtgggacttctattgtcattgtaatagccttggaaatcaggggacacattaagaacagggatatgctggccatactaattatctgttaaaacaaatgaaatatggcctgagaaggactctgtacttgagtccttgtggatgacctgtaacctagcttaataggcagacaagattgaaaacctaacttgggagtatgcacctgtaacagtagctgagttttggccaatcccagcagccatacttcaaccactcatagtctgctaagtgttcaaactgtgttcaaataaggcaaatgtcaacctggtgcaccaatccagctgtttctatacctcacttctgatttctgtacttcatttccccttttcttttgtctgtaaatcttcttccaccatgtggctgtgctggagtctctctgaatcttgctgtgattctgggggctgcctgatttgcgaatgatactttgctcaattaaacttctttaaatttaatttggctgaagcttttcttttaacaaatggtgtcagaagtgggatctgaagtagaccttctaacaacctccaaaattgctgagtcaacaagcaagttacctgatgaacgtatttgtgtcctttgatgtctcagaatggctggggattgtgtggtaagttctctctcagatttcggagctccacagatttatgttttgagctctccaggtttctttgagcaaatttctgatccaaactgggtttgaaagtcatgacagaaactggacgggttgaggatcaaatttgatctggtaattaactagcttggatccagttagaagcctcttacctctgactgggtcagaaagaaactggtagtaagaggtaatattgcaggggttataaaattttgcttttaaaaattcacaaggatttttgtgttctactcctttgtttcatttttcttgcacacttaggtaggaaagatcattggctaagttaatcaatggaacctagagccacgccaatattttaggtaaaaatgggattctcagtttctgaaaaactgagttccttctagcttatacattatacatacattatacatacatatacattccttccaacttatacattaggcctgggaagcagcaaagtcttagagaaatggtgaaatcttactaaagataatttacagtggaatgttctgaataaacaacaacatagaagtgtatttaaaaataagggctcctccacgtggctcaggcctgtaatcccagcactttgggaggcccaggcgggcggatcacgaggtcaggagatcaagaccagggtgaaaccccgtctctactaaaaatacaaaaaattagccgggcgcagtggcgggcgcatgtagtcccagctactcgggaggctgaggcaggagaatcgcatgaacccgggaggcggagcttgccctcagccgagatggcaccactgcactccagcccaggcgacagagtaagactctgtctcaaaaaaaaaaacaaaaaaaaaacaaaaaaagggctcctcaaaattaaatctgctaactgtttagtttagttactatcctgatccaaaggaaacagactgcagcaccaattggctgactttgggtaagtagtggggtacattttacctgagtaaaggatgggattgcattggaggccctcccctcagtaaagtccctcttggttaaaaatggattaaagatgacagggctcaaccaggggcaagtttgagccttgccagttcaatactgcatgctaagcagagtggctaatgtctatgttttgtcacatgtattttgctctgtccagaatgccaaatgttaatttcattaccctatgcaaccccttgggtggcatcctgcaacagtgagaaaattttgcctgtggttccatgattttttgtgtatgtggttggctccctggcactatagtatgtttcagggaaggggaacccaggaacctaacacgctggcaaaagtgtaagaatttcttaccagtcaggtttctggcctctctttccctgtgcttctctttccttgtgcaaactgggaaagttctggcctctctttccctgtgtaaactggttaaatgaatggtaaaaaatcagtttatcttctgcaaagttttgattaatggaaaaaagtatttatgaggttagtcttaagctgtagcgaatctggtatgtttatgcatcttctgtatcattctttcataaagaggggtaccataggattgaacatgggctttaaaccccataagcccactgctcaagatggcccagcaagctggtcagtaacaaactttgctgcaggatcctgaaacaaacaaaaaaactggataaggtctccatattgttttatgtctttgggagcttgaccttgtgaccatatggtggtactttctcttgctctctgccttccagggaaaaggaattttagggttcatgtcatagttacctctaaaaattatcttgagtagttaaaagcctttgcaagctcaaaattaactactctagactccttctgggatgggcagtggagacttcccagtgctgtagctcagtagctaagattttgttctttcacagtggtggcttggattcaatcctggcttaggaaatgcatactttctggttgatatctgtgtgacctttatcatttgttaattctcttcctctccatgaacaacttctgacttcccttcttgaattttcctttctttgagctacctttgaagattctagattttgtaaaaactgcatgttttcctagccctgtttcttgaagggctctgccctaaggccagaattaagaaactggcaaataaaacatctaataactactggatcttcttctgtctgtgtatttatgtatgtgttgtgtgtatgatgtttatataaaagatctctaattaattggcataaaaataagctcttaaatcaaatattttgaaagaaagataaaaatcctaatgtcttttagctcatgtaactttagtaatctttgggaaataaaaacagctttaaagattattggtaaaataaagacatttggtctaaattaggcaggtcagatattaggtttattaaatgctttaaggtcatgaactgttttgacttttgaaaattgttcaatttacctaccttgaagacactagattctagataagccctggggacatgtggaattagcaatgccccttagccatgcaaagaaggttataaagaaaagatatttttatataagaaagaatactgtatgttaaattcttatcctaaagtaaaataatggttatttaaaaagagagatgtttaggacaagtcagaaagtccaagcacactgtagatgaaagtctgtgtaagtcatgaaaggattcgtgaaaggaaatctgtgcaccaaaagcaaaagttgctgagttaccattataagatgtgattgagattactgaaaaaaatagttttacgtgcagggtatgtgaggatagtaaaatgtgtttttggcaaaagattataagaaggcatgggaatgtaaatttttgcctagtttagagggttaaaggattgttttaaattatgttagaataagctataaacttgaacaaggtgtagaagggttgtaaaaattaatcttgtaaaagaaattctgtgtgtgaacatattgactaaatttaaaaggggattatttgtttttcctgtaaattgaacatcaaaataaaagcacaaacaggggtttcttaaagcactcatctgctctttaacaaaaatttgtaaagggttataaaaggtttatcggaatctcaccttatggtcaaactgatgaagactggttagatttgtctatagacaaatagacaatagatagattataatctatccaaattatatataatttgttttattaagaattgggtttgacattaataatatactaatgcaagggtaaaatttggctttctctcttgaacaagattttcatgtaatattaaaggataatgaaagatttttctttgccttttgagtaaactactgaaaaaacggaaagacaacagaacaattggaaagctaagtctgtcctttatcaatgagtaaaggtttttgtcttttgaaaacttcgagtcatcattttggctaaatgaatgacttatggtaatctggaatactagttcataatattaagtgttttaaacctttaacatatttaataggcttctcaaaatcaaatttcagcttcaaaattgtcttttctgacctctaattttgagatgatacagagggctcttgaagcatctaaaagagagataaacaggattatttgacatgtttagttacatgggatcgtcaaaataaaaacaatgtttaatcttcttcaggttatattttcatgaataataataatatattccaaaattttatgcatttctaaaattctgatatgtctgagtatatgctatcaatcataattatggttattgttattatagatcacagaaataaccacatttccttgtctgttctgtctttacagctatttaaagtcacttccacaggtaattgcataatgctgatgcaatttctaaaaatttcacaagcacataaaatcctaaaatatgatgtcttttaggagattcatgaaaggatggaaaggaccctgaaaagtgctcttgaatataggtttctaataactttaaaatcacatcgtgggtaaaattccccaatttccccagaattggaccgggtaagaattcctgaaactttaataaaaagactgattggtttataaaactgcttaccccagtagaacaaaaattaattaaataccgagaaaatactttgccaggttttcatgctaactcagccaatattaaaattgttgagacatacaatttgaatgaactccatgctctaactgaaattacctatgacaacccgtcagttatcagtgttatgcacctaagtcagagaaacaactggtattcaagaggacataagtctagtgttaagcatggactcatggagaaccaggaaggctgccttgtccttcctgagtccttaaagcttttgttattaaaggttctgcatttcatgactcatcatggaaaagataaaattatccacattacatgcatactggtgtggtgacttatacattgctaaattagtttgtaaccagtatttggtttgttaaatccatattcttgggaagacaaccaaagcttcaggtacacttggctacccgatgggccatttaaacatttataaagggatttcattcaattgccattttcaacgcatgttttctgtttgtataaaagctttcccatgcaagagggctgatgttataacagtagattattacgctacagtgtattttcacctggtaaagaaaggtttttatgattccctgaggacaatcagcccctacacaatctagaacccaaagattggatcttctgagaacatcagagaaagactgtccttgacatccacactatagcaaaactttggaactttgaactttgggttcgtaatctcacaactgagaagggtccctccacactcttggaactgtacatccattggaacccttaaggtaaagctaaccagggaaatttctccccagaagaagatgccatccttgatataaacagcttttcccaagatcacagatcaagacttctactattatgagactcttatctttgaatactttttccttgtttatgcctctgtgaacaatagaaatggaaagggggtctgttgtgtgcacttatatggtatacttttattcataaatgattttgcagccagccttacacatgaataaccttatacctttacagataaaaaaatgaaagcccattgtaggtgagaaactttaaaggtagaaatattgccatgtaatcagtcagaaacagaacatggattcactcctcttaacccacatcgtgggctaaagagaatgttgctaggaggtcttcactcttcccaaaggcatcatttgttaggtcatttttctgtggtttgaagtaaaagaggcaatgattagaaatgtatccctcatgataggcactatagcagattctactgcaaagactatgcttacacaacagactttaaagtctcttgtgacagttatgctaaacagtagaattggctaaacagagaagaatctgtgcagtgctagcacttgtggcctaggaagaaatacattgggtattatagagattcagttgtaggggattaacaaaaagatcacttagttaagcaagtggactctttatctagctcattctttgatctatttgattttaggtggtttggtttatggggaacctgggtaaggagcatactccaaactcttggtattatcctcccaatagttaccacagtagtctctctggtgcactatattctcttgaaggttttaaatgtttgcatgcagccatctctagaatgtcaaatggtctctcttcaactggaatgacaaaagctgaagtaaacatgtgaccatgaggacaccgtaaactatgaaggacatgctgataccagaaacccaaaatgatggtaactgagagtggcactaaggccttaagtttggttacgctctcacctaagtgagaacctggccaaaaagggggaattttttagaacaaaattatgggaggccattgtattggactaagatcatgcactagaccccaacagaccaaaccaaaccaaaacggagttgcttatgctaaatttgacgtaatgaaactaagactttaaggaaacacataaattctagaacagaccaggttttgttttcctcctgaaaacagaatatttcagcatagggaggtacccactcagtccttgttctctccttggaaaactcattcttctactgtttcccagcgggtttgaagacccaataagtacatttatgatggtgatcatgacattaatgactaaagttttggtcaatctctcaaaattgagaaaatgaccaaaagtggggaattgttaaagcaagctaaatatagcctgagaaagactacatacttctatatttgagttttgtggatgaactgtaacctagcttaattgaaaaccttgcttaggagtatgtgcctgtaacaatagctgagtcttggccaatcccagtggccatacttcaaccactcaaagactgcaaagtgttcaaactctgttcaaataaggcaaatgccaacctgtaaccaatctaactgtttctatacctcactcctgacttatgtacttcattttctttttttttttttcatctataaatcttcttccaccacaaggctgcactggagtctgtctgaatctgctgtgattctgggggctgcccaatttgtgaatcactcatttctcaattaaactcctttggctgaaatttttcttttaacacctctgtacttttggaatagaagtactttatcataggcatgatatatcaagggcaatacagaaaatgatattcagttgatcgtaaggcaattactctcaccacttttttagtaaaatgcaagattgagaattaatctttgactgtcttatatcacagttccctgctttcccccaagcccttggtggcctttctccttggcccatgacttttttctgactatacacagatggcctctgaggtgtcccactaaggcttttcctccctgaaagtatgtccctcttattccaaaatgtattccacagaataaatgaaaacagtggtttacacttgcatagcactttagagtttacaaagctccttctcactcattattttatttgctttttataacactcctgtgaggtagggagcactatggaaaaattggattggtgttaagtgattttcacagagtttacatgccaggttagctcccgaaccagggcttaaactcagtcttctggtgccaagtccagtgtttactccattacttcacttggatgctgcatattataaaggagaaatagcttcaagatatgaatgattggttaacctcaccttctatggaagatgcacacttaaaagaattgcttgttaaatcatatagaaatttttcattggtgtaggagagagagcagttttttaattattaactgacattttccttcttcccattctactctttccattccaaaagatcagtgatatggtcttcactgctgaaaggtcactgactcactactaaaagtaatcaatcagcagccaataacctaggatgtgtacaatatcatacttactgtagtgtgagataaaaaggctcataagagtaatgatcctttcctatgaggaatttataacacagtgaattaagatgacatttattttaggagttgaagaaaaccccttgaaaaaaactttggggtgatatctgtaaacgcaatatgaattaaatgtgttgtgaccttccgtctgagcccttccatcccccacagaagaaggtaagaaatcaacagagcttgcatgcccctggtgggaccatcattctgtttttcacaataaactgctgaaaccagaccttaagaggaagctacaattagatctcatcacctacccacctgctttcaaaagagaccaatcaggttaattccctcaagctatgtatgcctgtttattccagtgttcacaacatctttgaaccttcagatcacccttatggactcttatctccataaagcttggtactttctgtagtctaacttttatccttttctgaccctgcacacactcttcattatgtactctggctagcattttgcaagcagaatcccttatgacctccactgttttttttttttttgcacattacctttatattactgcagtcctgttaagcagtgcagggtttttctgctatgctgggtctcaagttttggtaagtgccatttttgttttttcaaaaccatgctgattcagataatttctctttcttcctttgtagaaatttctatgcttggaagaaaattttaacagactgttccaactgcaaccctttcttgttttatcttcaatgatcctctcagccactcaccctccctcctcaaatattttgccaattataatcatctgcacagatgaccattcaatactttggcctcagttatttagcctcttctacagtaatttcaccctccaaccctaactcagccattcccatgaacatgctcctgaattttcagtatcaataacagcaacccatccatgctgtttcaagtattctactttctgatcaccaacttttaacctttcctgttcattccttctagtactcccaattatacattttttcaaacctgccagaaacaccaatccattgatcctatcatcctctcactatcctttattcctctcagattgttactccttccttatccaacttaatctccaaggtgtaagtttataataatacctttgcatacaccttctactcatttgttcatctgccccatccactggaggtttttccaggaattatgttcaatgcaatgcccatttttggggtatgcctgagctgatgaaggaaaacacacaacaagatagaaggtcttacaattgtgaccacaacctcaaataggcagttctgcattttctgtagtcaatttacatttttactctccgtggtaattgttttatacagagtttactcaaatctttagcaaatccttctaacttttagattcagctaaagaaccgcttattattttaataaaaaaagtaatcagaagagaagttttaccccatcccactgctaactacatccaccagtctgcatctgaaactgcaaactctgcctattcttataatgggcattctgctctatctaaggccaacccctccatttgtacccgggatcccagcctttcttgcctctcaaggactttgctcgagcaactgtgtctctagcatcatcacatttcggtcactgttgaagcattcccatcagcacacaaatatgctgtaataatttcaatattaaaaaaaattccttgacatcacatttttcttcaacgggccacctattttctctgcttttctttatagctgcattccttgacagaattacctatactaatagtttccacttcatctgctaccatttgtttattgaacctactctgatctgactttgtgtctcaatgactccgctagaatagttctcacctagatcaccagtgacatccatacttccaaattcaatgggcagttcttggtccttgtctcatttgacctttcagcatcatttaacatggtcaactttttttttgtttaaatttttattttttaaattaaattaaaaaaattttttttttttttaggctgggtgtggtggctcatgcctgtaatcccagcactttgggaggcagaggcaggtggatcacctgaggtcaggagttcgagaacagcctggccaacatggcaaaaccctgtatctactaaaaatacaaaaattagccaggcatagtggtgcatgcctgtagtcctagctacttgggaggctgaggcaggagaatcgcttgaacccgggaggcagaggttgcagtgagccgagctagtgccattgcactccagctggggtgacagagtgagactctgtctcaaaaaaaaagagaacagattttttttagagtcagggtcttgctctattgcctaagctggagtggtgtgctgcctttgcctctctagaaggtaggactatagttgtgcatgaccacgcccagctgattaattttttttttgtagagataagggtcgcactagggactactggagatagccaccatgcctggctctttctcttttttgaaagaggacacttcactctcctattccccctgccccaatttcctggttgctcccttaaactctcctttatagtaccctctttctcttcatgacctctaaatgaaatgcctcaaggatcagtcctcagatttttcttttctctgtttatgctttctaagtgaacccatccaagctaattattttaatgccatctttgtgctgatcgccggaatttttatctatagccctaacttctctgagccatagttttgtatattcttttgtggcctacttaacgtctctacttggatttctaaagagtatccaaagtttaaaagcaatctaaaacaaaactcttctttgcatgctatctgaaagtgatacctccattgtcctccccatttttgtaacagcattaccattcatccaactactaaacaagacattctgaattcatctttatcttctctctggtatcccacagtcagccattcatcagcaaatacaaatagctctgcacttaaagtatattctgaacctcaccacttctcagccataatcaaaggcaccattatcgcactttgactactgcaacagcttcttatctatttctctatttcaactcttgccttcctcttagatcctgctctccaatcagcaatctgattcattcttcagaatgaatcatgtgtctgtttgtactcaaaagtaatcacttccctctatcctttcttgttcattaaactctaaccacactgaattccttgtgtttcttgagcacactaaacatcctctcctcgcatgacctttgaactaactattccctttgtctagaatagtttttcaccttatagtacctggttctctgcttcattttcttcaggtctttggtgcaatgtcaccacttgagagaggacttctttgagagaggttgccaaaaagaacactccaaatctaattctgctgtcaatgacctccaaccaatcacaattagaagcaaacctgtagtcaaactaagttgggtttgttgactccttgtaatgagggagaccatggaagttccagtaagtaagaggattttagaaagaacatatagggtttgggtttttgttaggtgataatgggaaaggttcaaggaagcaggcttttctttcaaatgactattgttaggaagtaagagtaattctatagttgcatatcttgataattctcctctagaaggcagtaagaatgcagaaaatgaaaattttaatgggttaaaaaagcaacgatcactcatataaccgggatagggaactatttggttatttttatggtttggacatggtcttctttttgtctgtgttaagacatgaatatggaatagtcttatttttgaaaatggaatagtcttgctccattatggtactgagtagtcttgtcagatattggtgttcagagaagctgtttagtaggagatcatcaagtcctaactatgagtgctggactagctcctagccacaccaaggcctatgtgatagtgccaggccattttctagttatcaggggtagcttttctctttcatagtcctctcttttggctgaaagcagactaggacaggccacaggacattaatctataatatccatacagtgttttcatcattgtcaaaactatgtcggttaggaggttgtctagagaatgttgtctgtagtgggactaggattggtctctctgttctttttgctgcaaaacaaattgttgaatccctttgacatgacaataaatttgaggtagcatttaagaatatggaaagtgtacattagctatattaactgcagtgcaggcaattaccagtaacacaatggttattagttcttctttttttttttttattatgctttaagttctgggatacatgtgcagaacgtgcaggtttgttacataggtgtacacgtgccatggtgatttgctgcacccatcaacccgtcatctacattaggtatttcccctaatgctatcccttccctaaaccgccaacccctgagaggccccagtgtgtgatgttccccccgctgtgtccatgtgttttcattgttcacctcccacttatgagtgagaacatgcagtgtttggtttctgttcctgtgttagtttgctgagaatgatggtttccagcttcatccatgtccctgcaaaggacattaactcatccttttttatggctgcatagtattccatggtgtatatgtaccacattttccttatccagtttatcactgatgggcatttgggttggttccaagtctttgctattgaccagtgctgcaataaacatatgtgtgcatgtgtctttatagtagaatgatttataatcctttgggtatatacccagtaatgggattgctgggtcaaatggtatttctggtgctagatccttgatgaattgccacactgtcttccacaatggttgaactaatttacgctcccaccaacagtgtaaaagcatttctgtttctccacatcctctccagcatctgttgtttcctgactttttaatggttgtcattctaactggcgtgagatggtatctcattttagttttgatttgcattaccctaatgaccagtgatgatgaggtttttttcatatgtttcttggctacataaatgtcttcttttgagaagtgtctgttcatattctttgcctgctttttgatgggattgtttttttttcttgtaaatttgttgaagttctttgtagatttattagccctttgtcagacggatagattgcaaaaattttctcccattctgtaggttgcctgttcactctgatgatagtttctttagtggcgcagaagctctttagtttaattaaatcctatttgtcaattttgccttttgttgccattgcttttggtgttttagtcatgaagtctttgtccatgcctatgtcttgaatggtattgcccaggttttcttctagggtttttatgtttttaggtcttacgtttaagtctttaatccatcttgagttaatttttgtataagatgtaaggaaggggtccagttttacttttccgtatatagctagccagttttcccaacatcatttattaaacagggagtcctttctccattgcttgttttttgtcagatttgttaaagatcagatggttgtagatgtgtggtgttatttctgaggcctctgttctgttccattggtctatatatctgttttggtgccagtaccatgctgttttggttactgtagccttgtagtataatttgaaatcaggtagcatgatgcctccagctttgttctttttgcttaggattgtcttggctatagaggttctttttttggttccatatgaaatttaaagtagttttttctaattctgtgaagaaagtcagtgatagcttgatgaggatagcattgaatctataaattactttgggcagtatggccattttcactatattgattcttcctatccatgaacatgaaatgtttttccatttgtttgtgtcctctcttatttccttgagcagtggtttgtagttctccttgaagaggtccttcacgtcccttgtaagttgtgttcttaggtatttcattctctttgtagcagttgtgaataggagttcactcatgatttggctattattagtgtataggaatgcttgtgatttttgcaccttgattttgtatcctgagactttgctgaagttgcttctcagcttaaggagattttgggctgagacgatggggttttctaaatataaaatcatgtcatctgcaaacagagacaatttgacttcctctcttcctatttgaataccctttatttctttctcttgcctgatttccctggccagaacttccaatactatgttgaacaggagtagtgagagagggcatccctgtcttgtgccggttttcaaagggaatgcttccagtttttgcctattcagtatgatattggctgtgggtttgtcataaagagctcttattattttgaggtacgttccatcaatacctagcgagatcaacgcagaaggcgagtgatttctgcatttccagctgaggtacccagctcatctccttgggactggttagacagtgggggcagcccacagagggcaagctgaagcagggtggggtgtgtcacccgggaagcgcaaggggtcggggaactccctcccctagccaagggaagccgtgagggaccgtgcagttaggaacggtgcccagatactaggctttttccaaaaccagcaggatgaagatagggaagattatcttgatgcatcttttagttaggtaataaaggaggttagattagtggcagatcaaaatgaaagaaagagggctgagaaatcagaaaattaatcttgttttgtggtcttgggtgaaagctatccacttctgtagtcatcagcttgtagataatttttaagaatccttaactcggggtcttccaagtgcatggatttccaggctttgtaagaaatagatgtatctttttagttagaaagcctaactcccattactgggtatatacacacccaaagaaaaataaatcattttaccaaaggacacctgcacttgcgtgtttatcgcagcatattcaaaatagcaaagacatggaatcaacctaggtgtccaacaattgtgtgctggatagagaaaatgtggtacatagatacaatggaatactacatagccataaaatagcataaaattatatcctttgcagcaacgaaggatgaagatggaggccattattttaagcgaattaacacagaaacaaaaaaccaaatactgcatgttctcacttataagtgggagttaaaccttgagtactcacagaagatgagaacaacaaatactggggaatccaaaagtcaggagggaggaaagggggaaagggctgaaaaaaaaacttcctgttggatactatgttcactatctgaatgatgacatcaatagaagcccaaaccccagcatcgtggaatatgcccttgtaataaagctgcacatgcacccctgaatctaaaataaaagtaaaaaataaaaaagcgtgactccaacgaccaacaccttgaagttttactgttgtgtcagttgttaataatccctgccaaggttcttttcactggggctgaagggctgtttctctctgacgtattttctagaagactagatctccctatttcagatcagacagtgggtgttttaaaaatgtagtttgaacctgtttgtgttaaagctggcagcatcatatgtgtctcatgtgatatttggtcacattaacctgtagtatggcataatctaggtttagaagtaaaattttcaaatgaactgggtagcttattattagctcatacggagatcacctgtgggtcccagagaaggtagatctcattgtcatgaaggctaatagaagtctgagtacttttgagaactatgccaattttagttttagaatttcattagttctttttacttttcttgatgtttgtagacggtaaagatagtgaagtcttaagtaaaagatacaggtttacagagttatttggtaatagtataagtgaattatatgcccctattactagaaagataagttaaaatttcccatattggagaaaaagaaattaaacattctggtcacaactgggccatagctctttgtcaaggacaagcatcaactcatcacaagagtaaataataaccagaacatatttatagtccattgctggggcatttatataaaatccattcagaggtgatcaaagtggccttgagcctttggttcctatcaatatcctacttttgcaatcctcccagaataatctcatcagaaagtagggcatgcatagaaaatgtctttggcaatattcctaaaattcttccaccatgttggttaaatattattgtcaatgcatctttattattttggataatattgtgaagcatttttgttaaatgcacttttattatggctatatccttaggtaatatcaaattgtctaaaagtttattaattctcctttcattttatagggattcctaaagagatgaggaaatttgcttgttttcaaagcattttaaaataatagactaactcaaaattatatctactatcaatataaatgtttgtttctttactgtttttcctctggcaggtccaggcaagggcaatgaatttaactctccaagctgatttagtttctgggagaagcttaattttcaagagtaaattcaagctcttgaattaaagctcttgagatagcataaccttctttgcaattttcagtttttaaaaaataataaactattatgtaatattgaatcaagaatatctaagggagtctctaggtctgtgcaaggtatgagctgttgtctaatttaagtaagcagtcatgggcttttcctttgggtcatgtaaggaaggtgactggggttagagcgttaaagtaatagacagtgatgtgtaagtgttaaagtaatggacagtgacatgtaagggcaaagaaacaataattcataagaagtttggctaatagctaagaagcttgagggatttttgtcatttgcagggtctgtaaagtgtaaggaatcattaaggtcggtgtaaatcctagaactaaattaactgaagactctcattgctgatataggttttaggcaaggtgatgtatcttgactattgtaccataaaaaagactgaaattagcaataaacttctgaggattcctctatatttgagtcagtattcctagtgcttgtccagccctctcataaacaaaaggaaaaaggggtttgtggatttagaaaactggaagcaaggttgtttttttttttgttttcagatagttgtatcactctttgggcctaaataaaaatattctgcctttaactggaaaagaagagttttagatggagaagaaccaattagctgcctcctataaggagtctcttatgtgaaacaggaataagactataataatctccaataagaaaagataatgggactagaagctaaagttttaaaacaatataatttttttttttttttactagttagaggtattcaaggatggaacaatttcttcattagaaatgaggaagaatagggtcgggcatggtggctcacgcctgtaatcctagcactttgggaagccgaggtgagcggatcacctgaggtcaggagttcgagaccagcctgaccaacatggagaaaccccatccctactaaaaatacaaaattagccgggcatggtggcgcatgcctgtaatcctaactagtcgggaggctgaggcaggagaatcgcttgaacctgggaggcggaggttgcagtgagccgatatcgtgccattgcactccagcctggacaacaagaggcagattctgtctcaaaaaaaaaaaaaaaaaaaaaaaaaagaaataaggaagactagtaaaaatttcaatcaaagcctggactatcatttgtttgaaataagaattcaaatattatttggatggctagaataaattattcaggctatttagaccaaaccattatatgagtgcacaaaaggctccagttgtaaggaacaggtgaatattctgaaaagaagggcaattcctgtgcttcaaaagccaatcatgtatatttatggttttgttttgttataaactcaagagaaagagatgaacaaaagtggttggtggctttccaatagggttaagaggaaaagagggaactaatatttattgcatgtttacaatgtgccagtaaaataaaagggagatgctggaattttttttttaaattcccaatttctatacagcagtatatagtttatcaatagcaaagaaagacaatttgaaaaagtaatggttattgttaaacctgctttattttccaccaagtcttggcaggatgagattcaggattagaacagaaggtttaccttgttcataagatacatctaaatgaaggtgtgggaggggagggctagaactgcatgttaagaagtatgtaagtgtatggaaacccataaagttaagagttgaagtgtatgggagtgaatttggatgagatttctttagagcaaaataaacattttttcttaataaatactacaggttgcttaatcagaatgacaaaacaggtaaagaggcaaggtggtcatgatggtgtggtattaatttcataaagctatctgttgctttggaggcatgggccccagtcttagcatacctgagcttgagttctagtatttgcattttatccttttcattattgacaaaatgagaattaatcaaacttattttaattattcaaagtaatgaaatgtatgtgaaaagcctttgtaaggtgtaagacactatgaagtgtttgttttggtaacaatgaagttatccagtaagagtcttattctgctagtcatggatatgcatgggcaacaatgtctgcctccccagattccagtcactcctctctattgtgttgcatcatgaagcttgagaggaatggattgattgattggtcccattccctaacccatatctcaataaagtcattggactgtaacccatatctcaatagagtcattgagatatattgcattaagccatgcctgaagccctattttctctctgggcattctagttttatgagccaataaatccccttcagcttgagttgaaatttttgtttcttgcaattgaaacaatcttgattgatgaaacatttaataaattttgactcactgacagttttatggaaaagaatgtaatggagaccaggaagaatactgttactctggatttaattctgattgataggaaagaacttgttaatgacatgtatggtaggttaaatgaaagtagctttggagtcaaatatatttgggtctaagccctcattccagcatttgttatcagtgttactttaagcaaataacttaatgcctttcagctttagtttcctcatctataagttgggtgtaataataatgtctatatcatcggagtggtaattaggattaatagataattaatagataacacacataaaatatgccatagcacatattaaggattcaacagggattaggtttgaaaaactagaaatggaagatgcagaataaagacttaactgcccattattgccctatctctaaaataaactgaagacaataaggaaaatgaatgagaaagggagaaacatcatctttttaaattaaaaggcaacactttaagtgtgaaaatacactaattagaagagctaatgagtgcatctgaaattagatcagggtaaaggaagatgccaggagaggatgactacattatagagtttggacagagtcagcacagcatagatttctccataggggccaatgggtagccatactttggaacataatcatgaaaggctgtaagtctctgtaacctccttgctgttacagtgtaacagaagaggcaaggttgaatgaggaaaccttaaacatactatctttggaacaacgctaattatgaagaagaatctgtgtatgacaagcaactctacagctatttacctttgttaaccaatgaagagagaaggtcaaatcaccttgcaatctcacagacacaaaatatgtactatgtagggcttcactgtgagctagagggtatccttattggcctagaacattcttctgaagccttatgcacactatcttcctaaaaataacttaaccaagaagaaatcacttaatttaaagagaaatattatttaaaaagcaacagaggatttatataaaacactacaatctgaaaatgaaataagaaaacaattttatttacaatagaatacaaaatacttaggagtatatttaatcaaggaggtataaaatttgtacaccacaaactataaaacattgctgaaagaaattaaagaaggccttaataactgtaaagacattctgtgttcatgcattggaagacttaatactgttaaaatagcaaactactccaaatggttggcagactcaatgcaatttctaccaaaatcctaataccctgttttttttttgtttgtttgtttgttttgcagaaaccgaaaagctgattttaaaattcacatggaattgcaagggatccagaatggccaaaataatcttgaaaaagaaaaataaggtgggaagactcacatttttatatttcaaaacttactacaagctgtggtaacaaaggcattatgctaatggcataaggatagacatacagatcaataaaatagactgagagcccagaaataaactcaataatgataaacccaagaaacaagctcaatagaatagattgagagtccagttaattttcaacaaaggtgccaagacatttcaatggaggacagaatgatctacttgacaaatggtgctggggcaactggatatccatatgcaaaagaatgaagttagacctctatctcataccatatgaaaaaattaactcaaagtggatcaaatatctaaattagaaactaaactataaaactcttagaagaaaacacaagagtaaatctttatgaccttggacttggcactagattcctagaaatggcacccaaaacacaagcaatacaaggtaaagtagatacattggacttcttcaaaattaataacatttgtttgtaaaaggacatatcaagaaagtaagaagaaaatctaaaggatgggagaaaatatttatgaataatttatctgataagggtctagtatctagaataaagcactcttacagcccaaccccaaatagacaaacaacctgattaaaaattggcaaaagacttgaatagacatttttacaaagaagatgtacaaatggctgacaaacatataaaaatatactcaacatttttagtcatcaggaaattacaaattataccacttcacactcaactaggatggctgtaatttagaaaaaattaaaataagtgctggtgagaatgtggagaaattggaaacctcatcaattgctggtgggaatgtaaaatggtgcggccattgtagaaaacagtttggctattcctcaaaagttaaatatagaattataatatgatctaaaaattccaatcctagatatataacctaaagaattgaagaaaggtattctaataaattattatatatgaatgtttatagtagcattattcacaacagccaaaagatggaaacaagccaaatgtccatcagtgaatgaataaacaaaatgtgatatagctacaaattgttattattcagccataaaaacaaatgaagttctgattgaccttcaaaagctttatgctgccctctccctctccctctcccctttgcacggtctccctctgatgccgagcggaggctggactgtactgccgccatctcggctcactgcaacctccctgcctgattctcctgccttagcctgcccagtgcctgggattgcaggtgcacgccaccacgcctgactggtttttgtattttttcgtggagacggggttttgcagtgttggccgggctggtctccagctcctgaccgcgagtgatctgccagcctcggcctcccgaggtgccgggattgcagacggagtctcgctcactcagtgctcaatgttgcccaggctggagtgcagtggcgtgatcttggctcgctacaatctccacctcccagccgcctgccttggcctcccaaagtgccgagattgcagcctctgccccgccgccaccccgtctaggaagtgaggagcgtctctgcccggccgcccatcgtctgggatgtgaggagcccctctgcccggccgcccagtctgggatgtgaggagcgcctctgccgtgcagcgaccccgtctgggaactgaggagtgtctctgccctgccgccaccccgtctgggaggtgaggagcatctctgaccggccgccccgtctgggaagtgaggagcgtctccgcctggcagctgccccgtcagggaggtggggggcagcccccgcccagccgccgccccgtctgggagttgcgggggcgcctctgcccggcgccccgtctgggaagtgaggagcccctctgcccggccgccaccccgtctgggaggtgtacccaacagctcatcgagaacgggccatgatgacaatggcggttttgtcgaatagaaaggggggaagtgtggggaaaagaaagagagattggattgttcctgtgtctgtgtggaaagaagtagacataggagactccattttgttctgtactaagaaaaattcttctgccttgggatgctgttaatctataaccttgcccccaaccccgtgctctctgaaacaggtgctgtgtccactcagggttaaatggattaagggcggtgcaagatgtgctttgttaaacagatgcttgaaggcagcatgctggttaagagtcatcaccactccctaatctcaagtacccaggggcacaaacactgcggaaggcggcagggccctctgcctaggaaaaccagagacctttgttcacatgtttatctgctgaccttccctccactattgtcctatgaccctgccaaatccccctctccgagaaacacccaagaatgatcaataaatactaaaaaaaaaaaaaaaaaaaaaagaagaaatagaatagaataatataagtaagttacatgtgttcctctaatttgtgttcatccaggggaggcaaatgatggcaacaggccaaatccagcctgccacatggttttataaatacagttttattgaacacagcctcgcccattcatttacttatggtctatggctgcttttttgcttcacaatggcagtgttgagtaactgcagcagagaccacacggactgcaaaacctaaaatatttactatttgaccttttactgaaaaaagtttgctgacccctgatctattcatcataaacttctttttgataaatggattctaacagagacaaagaacttagggcttaccatcaaaacctttgaagttctgcctggttctgtatgtggaggctctcatggtgttatcattgcactcttttaccaatcccactgcttctgtccccagtaacattctaatcttggaggcacgaacaagatataagttctgattttctagtgtttcttgttcatatttatttaacaatggtctaaacaacaactgggcaccttcaaaaacaaaagataagcacaatcttagacaaacattaaagtttcaaaaataaaaactttctaaataaataaaaaaaaaagctttatgctaagttaaagaaaccagacataaaataccacctgttgtatgattctttttatattgaacatccagaataggtaaatttgtagtcagaaagtagactagtgtttacgaggggatgaggagaagtggagaacgactgtttaataggtatagaattttctcacagttagtgttgttgcaaagatagtatgtttaaccttacctggagctgagacaaatttaaagagccgagcgaaatacaggggtggaagaagcagtgggaagagccctgtgggtaatctcagtccccagggaagccatttgtgacttttttccacagaggtccttggggagggctgccagaggaactgggaaaagaccacagggaggaggaaacatccagctgaactttgtaacagttttgactgaactcaaagtttcctagacagaactcaggggagggagaaattgagagcacagacacagcacagaagcctaagcaggtgggaaggtatgaaacctgaaagccccgcttgctttctcagccaggaggctggtagcctggggcaagttctcagctctgctcaccctctgcctggaaataaacttggtcctgctagcggggcaccaaaagcagttggtgctgttggtgggggcaccaaaaggctgggagttagaccagccttttgggctttgtgggagctgggttaggccagtaactgctggctttcccccacttccctggtgacctgtatgacccagtagaggcagccataatccccctgggaacacaacttcattgccctcagaaccacactcccatctcccacagcagccttagcaagcctcgcgcaaggacagtctgagttcagacttgcctaaccctgcccccacctgatggtctttctctacatgccctggtagctgtagacaaaggacatattctctcaggagctctaggaccctgctcattgcctgaccctcacagagtccatttcacccccctactgctacctccaccggagcaggtgctgctatccatggctgagactccagacaatggttcacatcacaagactctgtgcagacactcccctgcccctgccccaagtaccagcccagagcccagtggcactactgggtggttagacccagaagagaaataatgatcactacagtttggttcccaggaagtgacatccccatgggaagggagatagcacacatcaagggagcataccatgggacaaataaatctgaatatcagcccttgagctccagattttctctctgacatagtctacccaaatgagaaggaaccagaaaaacaattctggtaatacgacaaaaacaaggttaacacccccaaaagatcacactggatcactagcaatggatccaaaccaagatgaaatccctgaattgccagaaaaataattcagaaggttgattattaagctaatcaaggaggcgccagagaaaggtgaggtccaacttagtgaaatgaaaaaaagatataagatatgaaagagaaaatattcagtgaaatagataacataaataaagaacaatcacaacttctggaaacgaaaaggcacacttagagaaatgcaaaatgcactggaaagtctcagcaatggagttgaacaggcagaggaaaaagctttggaactcaaagacaaggctttcaaattaacacaatccaacaaagacaaagaaaaaagaataaaaaaaatttaacaaagcctccaagaagtctgggattatattacatgaccaaacctaagaataattggtgttcgtgaggaagaagagaaatcaaaagtttggaaaacatatttgagtgaataatcaagaaaaacttctacagccttcctagagatctagacatccaaatacaagaagctcaaagaacacctgctaaatttattgcaaaaaagattatctccaggcacatagtcatcacattatgtaaagttaagatgaaggaaagaatcttaagagttgtgaggcaaaagcaccaggtaacctataaaggaaaacctatcagattaataatagatttctcgcagaaaccctacaagctagaagagattggggccctatcttcagggtccttaaacaaaacaattatcagcaaaggatttttgtatccagtgaaactaactttcataaataaaggaaagatacagtctttttcagacaaataaatgctgaaagagtttaccactaccaagccagcactacaagaactgctaaaaggacctctaaatcttgaaacgaatccttgaaatacaccaaaatagaacctctttaaagcataaatcttacaggacctataaaacaaaaacacaataaaaaaccaaggtattcatgcaacaaatggcatgatgagtagaatagtaccttatatctcaatactaacattgaatgtaaatggcctaagtgttccgcttaaaagatgcagaatggcagaatggataaaaattcaccagccaagtatctactgtcttcaagacactcacgtgacacaaaaagactcacataagcttaaggtaaaggggtggaaaaagatattccatgcaaatgatgctaaagcaggagtagctattcttatatcaaataaaaaactttaaagcaacagcagttaaaaaagacaaagagggacattatataaagatgaaagaattgtccaataggaaaatatcacaatcctaaatatatatgcacctaacactggagctcccaaatttatgaaacagttactactagacctaaaagatgagacagacaacaacacagtaacagcaggggacttcaatccttcactgacagcactagacaggttatcaagacagaaaatcaacaaagaaaaatgcatttaagctatgtcctagaataaatgggcttaacaggtatttacagaatattctacccaacaactgcagaatatacattctatttatcagtacatggagcattgtccaggagaggccatatgataggcctctcaaaaacaagtctcaataaatttagaaaactgaaattatatgaagtattttttatgtaataattacataattttatgtaattttatgtcttgggttccacacttactatcttatggaacctgttcccttgaagggtcaccagtgacctcataatggttattttagaaagcctttccccccccataatggcctttttagggtatagctatcatgcaataaattgaatatatttaaagtacacagtttgataaattgtgacatatgtatacacccatgacgccatcaccacaatcaaattgattaacataaccatcaatcacaaaagtttttttgtgccctctcatgatcctgtttttctctttttgcccccgtcttcctttcccaagcaaacatgaatgcactttctgtcactgtagattagtttaaaatttccagaatttctagaattttatgtaaatgaacaatatatacttcttttggtctattttttatttttttttactcagcataatcattttgagattcttttatgtcatgtcttttaccaatggttcactcacctttattcctgagtagcattccattgcatggctatatcacagtttgtttttccaatgtataagcacatggttgtcaaaacatagtaaagcatagggaactaacttaaaggtgcatggaacaacaacaatagcacagaaataaatgctgctatgcctaagaatctaatatgtgataaaaaggagagtataaatcaataaagtaggcaaatttaaaccaagtattttgaagttattaaatggataaatgaggcaaaaaatctaaataggcccctcacttcactcaatatagcaggggtaattaagaagaacaatgacattattaagattatatagtttacatttattaaatcagttgtgacatgatctccttttagaaagattatttagtcgtggtgcgaaggataaactagaaatagtaatcactgaattatggatgccaaagtaaggaggttatggtagcattaggatcatgagttaataaaaacaaggcaatgagaatggagaggaaagggaaactatcagagatttcaaaatttcagaggaagaaatgatagggggaatcatatttttctaactgcaatttaatagaagcaatcccttaacttttttccaggcttgtcttcaggtgatagagacttgtaatttctcttggaaaaacattttactaggtgactaggattcaagctgtaaatcttggttaatcacaaactttatgagtttagattagttgtgtaaccttctggactgtttgctttctctcctgtaaaggtcaactctaagacttcttacaacttcagatttcttggataataatttattatcttgaactgcatctccaattgggcctaagacaacagaccaattcagtgggaaatgaaaataataaatgaattgtatgggctaactaccactcacagggccttagtgaagaaggtgactataatctagattaaaagtctttccacacggtgttttctcttaatgatgaaggaagctgtgcaggcaggaatagggttacagggtactaattcgcttctgctctgctgggttgaatggcactcaagaggttgagtgtttgtaatgaaacacacacaagttctggaggcaagaagactagagttttgttacttttgacaagttacaggtcaatagagactgcctcttaagaagacctagaggaaaatgcaactttttaattaatctcctgtgtttctctggctcatgccattatcatagataagaccaagggatgcctctggtgattcattagaactcttaggctcactgattactctttggtctctaaatgcttctctgtggtaagaagagtagttaacaaaggaagctgggtttccccagaggaccttattaaaactgttgtggttttgaagtgattaacatgtaaatgaattaatgtggtcaatgaaccaagctatgcacacagagcatatctaggaggcagagaatcatacagtctagtcatactcaggaggaaactgtttagcattcagaggtgaattctggaagaaagatgaaaaaggaactcagaattactgctttaatttcagaaacactaaacatgaaatgacagaagattagaagatttttgtagagtttgtacatgttgctttagaatagattcctggagcaaaagtagaaatggcttaccattagagcaagcaggttagctcaagaggctatactaagctacttttgcacacctggtggcaccacatcctatttgcagtctgcaaacatcatcacctcccttaaatgtgacacttgttatatctcagaggcaagttaatcttactcaactgtatagaatagattagagggtggagagagctagctgatttaaactctaggtgaatgttagaaacaaatactgaaattgaaagtcagaaagagaggcaggttttgtgtgaaaagcagttagattttgacttgtgtaataataagatctcttgagtaaataaaacaaaatttctcttaggagttcatcagtttcctttgcagtcctaactcactagggatgtcagagttagggtcattatagcattctttgtgagttacagttagttgtagcctgtttgcatttactgatttttatgagataaagttgctttactaccatttgcctacaaattgtaatggaaattaaaatctatgggtctgtgatgtgaatagttctcctggggttggacagtgcacacctgcatgactataggcaaaaccatgtcagatgagatgtttatttaaaaataaatggctcacctacttccctaaaatttttctttgaaatgactaccaaagatacaggtaggactgattgagaaaaggcagaaattgaaggtctgaaaagagagaaaagtcaagaaagaagaataaaaagatgtagtctgggaagtattaggcaaattaggcttgagcaatattatgaaagttttcagcattgttcccttataattgcaaaatgggaagtattgtcacctctttcattttttggaagagtttgtgaaggattggggctaattctttaaacatttgatgcaattcactagtgaagcttcctgggcctggatttaactttgtggaatactttttgtttacttaattgatcttgttatagatctgttcggattttctatttcttcttgagtcagttctggtagtttacgtctttctaggcatttgtctttctcatctaggttatccaatttgttggcatatgccattgttgttcatagcattcccttataatcatttttatttctgtaaaatttgtaatgtttctattcctgattttagtcatttcagtgttttctctttttttttttcttggtcaatttagcataacaaaaagtttgtcaattttcttgatcttttcaaagaagacatttttggtttaatttgtttttctctattgcttttataatctctatttcatttatttccactctagtctttattatttccttccttcttcttgctttaggtttagtttgttcctttatttctagtttaaggtaaacagatgattaatttaatattttttctttttataatttggtgtttataaatttccctttaagcactgctttagctgcatatcataagttttgttatggattttttgggtgtgtttttgtttcctttaatctcaaattattttcatatttcccttatgatttcttctttgattcattgtttatttaggagtgtgttgtttaattttcacatatttgtgaatttcccaaatttcctttttaacttttagtttaatttcattatggtagaagaaaattatatagttttaatccttttaaatttattattttttccttttggttcttttgttctaatttctatctcttcattgatattctatagttagtgagccataattcttatagtctcttagttccttatttgtgattttttaaagttctttgaacatgtttgaaatagctgatttaaagtctttgcctcataatttcaatatctagcttcctcaaactttccttttctttgtttgacttttctgtagaccatatcttcttgtttctttgcatgttttgtctttttttttcatggaaaacttgttatggacattttattttacttttgccttgaaacattttatttatttatctttaaaattttatcattttttgggagatatttaacattttaaataatatggcaactctggaaatgtcactcaccccctcggggtttgttgctgctgcttgttattgtgtttgctatcagtttgtttactgactttcctgaatgcatttgtaaaacctgtattctttgtcatgtgtggccattaaaatctctgcttgtttagcttaatggtcagctaatgattggatagagatttccttaaatgtctggaatcagtaggtctcttatccttcactgatgggctttgtgcatgtgtttcaccagaccttcaatatttagcctggcagtttgcaactctgccttagccttcacttcttgctctcacagagcttcaaggtcagtcttaggtgagatattaggtacttcttagatctttcctaggtcttcaagtggcctttggcgtgtatacagccttctgtgtgcttctgcatggctttctagagtttcaggaatatgttggagtttttcagagccccctattgacatttcgttattcagcttttcctttaagtgtattggtcagtttcttgtttgttccaccattatcatctcctcaggcagtggcaatgttaaataattggtgcttattgttttccacctcctcccctccaaaaaggttgtttgcaatgagcaagttctgaataagatcaaatacaggcaagtcttgccaatggaggttgcaggaatatgccagacaggtcaaataatgacagtgctctgagaatagtgtttttggggagctccaaaccagctttgccctgtctagtagcttcaaggctgctgtttctcaccattatggcagtgctgttggttttcaaggctattggagagctggggagaagaagacgagaacaggacaaattaaaacaccacaaagttgctgctcactgttcttatctagatacagccagttttcgtgagtaaatgcttcttgaattattgcaagtcttttgttaatttccagagttcagaaaaaaaatatttatttatttattcattgtttttgagatagagtctcactctgtcacccaggctggagtgcagtggcacgatctcagctcactgcaaactctatctcctgggttcaggtgattctcatgcctcagcctcctgagtagctgaaattacaggcgtgtgccaccacgcccggctaaattttgtatttttagtagagacagggtttcaccatgttgcgaggctggtcccaaattcctgaccttaagtgatctgcctgcctcagcctcccaaagtgcagggtttataggcatgagccactgtgctcggccagaataagttattttgacaatttttttggccagtgttttcattgcctttgtgaagaggtggtttttgattgttatgctgctattctcactgacttcactcatgctattctgtcatgcctcaatcaatcttcatcacagagcacagtctcttcatcatttcccacaaaatccagttacagcaagtaattatttttcaatagactttattggagtctatttgaataattggcagataaagtcccatttttgttgtatgttactttttgccatcttggagggttttaccattttttcctttacttatctcccaccctatccccagatgcctctccctgtaatattaaacctattctttcttctttgatcctacttggtgttattttcttctctaatcattgtccaaaaccaatgaagttctcttagaactttggaagaattcaaatgaattagaattatattttgttataaatattaaagtcccaggtaagttgcatatagatcatttcaaaatgtcttttcaagctatccaatgacattttggctggctgctgcttgtgaaaccaccaagatctccatcctccttctttctttctttgtctctctccacctgaattaatttttgtcctttcatagatgagacctatttttttttgtaacttggagagaggtgagaaaatttggatcagtaaaaaggctaaggtgaagagatgagaaaatattggaggaggaaggcataccatctgttctccacttgtctcctcatactgattttgagccccctgtagagacagaattttagagatagaagtggattgaaatatgttcaaaaggagctttgtgagatgtacagaaaatacactctcttttccagcactaatggacattctaaaaaattgggcatgtattaggctacaaaggaagcttcaatattggagacattgtagctgcattctctttttggtcagaagcaagacagggataaccactatcagtgctactctttgttattttcctccagtagtatgtttgcagaaatattctttagtgtatacatcagatgatatcgtttggatatttctccccactcaaatgttgaaatttaatccccagtgctggaggtggggcctgatgggatgtgtttggatcatggcagcagatccctcatggcttagtgctgtctttgtgataatgagctcttgtgaggtctggttatttaaaagtgtgtgacactttccaaccccaatttgctccttctttcgccatgttacatgcatgctgcttctttgccttctaccatgactgtaagcttcttgaggcctccccagaagctgatcagatgccaacaccatacttcctgtaaagcctgcagaactgtgagccagtcaaacctcttttctttataagttatccagtctcaggtatttctttatagcaatgaatgaatagctaatacagtagggactatgcctagcactttctaggcagcaatggaagggctttgtatattcagtagtgagtgttcttgttgttggttgagtgaatttgtagtgttagggtgagtagtgtgagatttgattgattagagaattccctgtgctgtgtttaaacattgtttttggctgtatagcattgaattctcactgcctatctctgctggagagtctgtgatctatttaatatatcttaatatctttcttttctacttaaattagcttagtagattttattaagttacatctgaatatttgactgacaaaaagaggatcttgctaaagctaagatagtaaaaatagtatagtagtattgcagagaaacaacaagatgaatataaaactcaggaagttcaataggtacatttgtgaatcaagttcataggtgagtctaatatgataacgatgatgccacaaatctttagggaatggtggattatttagtagattgtgctattaaaactgtcctgctctatggagaaaaataaagtagttgggtcttctacagatgtaaattttagatgaattaaaacctaaatgtaaaaaacaaatctataaagataataaacacagtgtgggaaaatgtatttgtggctttggggtgaagaatgatttctaaatcaaaatccctaaagcccaataaggtgaaaaaaatgataatgttgattccttcaaaattaaggatttccattaaaaaaaaaggacaccatagacaaagctaatagactgggaccatattagaaaaagatacttgtgattttggatacagcaaaaaattaatatatgagaaactcttatgatttactgagaaaaactagaggtctaattttaaagtgagaaatcatgtatatggataacatgggaaagggaaatacaaatggctcaatagactaataatcagggtaatgcaagttgacattccatactcagtagattggtaaaagtagacagttttataatactaagtgttgttgaggttatggaaagactggaatgctcatgcactgctcgtagaagtgtaagtggctgtagctactttcaatcattaccgtcgtgaaattgagtatgtgtatgtactatgattgaacaatccttgctggggacatatcctagagaaattctcacatagttaataggtgaaatgtaaaaaaaaaatgttaattgctgtgtttgcaggagttacaggcagcctataattccatcactaggggattgcctaagtaagtgtggtgcatgctgaaatactgtgcagtagttactttgaaccaaaagtacataaccagtatctaaaaagagttttaagttatctgtagctctgtactaattggcttcagtaagaagctgcttaaagccttaatcagcttacttgtcaaattgtattccttttgtgttcccctctgtgttttggttgtcagaaatttcagagctcaaattaatcatagtagcgatcttagtccttccactaaatatatctgtccacttccctttgatttttctatcctcattttagaggcatttttgaattctgtattttatttggaagctttttgaggtcgtatatataaataaaaggtttctgttggacctaaatgatcatcttatcattattactatttttatttttagacggagtcttgctctgttgtccaggttggagtgaagtggcgcaatctcggctcactgcaacctctgcctcccgggttcaagtgattctcctgcctcagcctcccgagtagctgggatcacaggagactgccaccatgcccaggtaatttatatatttttagtagagacagggtttcaccatgttggccaggctggtctcgaaatcctgacctcaggcaatccacttaccttggcctcccaaaatgctgggattacaggcttgacccactgctcccggctcatcttatcattattaaggactctgtcattaagaaaagagaaaagattaggaaagaaatggatttcctctcacctagaagactattaaagaaaggaaaggggatgcataaagcaaccatctgaagatggaaagagaagtgtgttactccatgaaagtatgtgtttaatagccactcacctgaatgaagaacatcttttagtattcagaaagcttttccaaaaggcagttatttcctctggatagccttcatattcctatggaaattgaataaggatgaaaaatttgaacaaaagcaaaggacatgaaatctcttgaagatatgagaagctgtgaacacttgtcttagagggtgcatggagaaattatttttcatgagttcccatgtagtccgctaggtggcggaggttacataaaaaccctactgtataaacactgaattgctacacacttgtgttttctcttctttttcaagtaaaatcccaaggaaacctgtagagtataataaaagctggagatagaactttgtagtaagccctatattaataacaataacagtgtcaggttgcaaaatgaggataggtaccataccaaaagagatgatctccaaatgcagtttttgtttcttttgtttacagaaaaattacaactgatttttttttccatatttgttccaaagatcaccttgaatgcaaggaatcaaattttgatcagtatatttacacagtaacttttgtaccttaaaaaattcatttcttatctactgcagctactaatatctcacgctaattattttaaacacattagcaggtcatcatgtcatatgtgacaggacttagcatactttttgtgtgactatatcactttaatttgtgtgatgaagcagtgccccattaattatgtgactccttctaatacccttagagaagaaaggaagctccttgaatactaaatttgcacaaccacagtgaccttataaaggatgcattcccttttaagattaatttctcagaacaaagcacagtgacgtcattactaagcagcctcacaactgtagcaacccttctaaaggttgtagattctggctgatgatgtcactgacacaaaggaaaaaatgcaaaacaggtagtcttaaataagcattctggtgagaccaactgcattttggccatggctttgcagagcactctgggggcggtgtggctagggcttctcctcaactctctctggaagggtgagtagcctccttcactatttggttttgtaaaagtgtatgaaattgttttaaaatttggactcatttttaatacaaaaacaagagaagtcagatctaacattcactgtacctaaggggcaatcaacaagccaaatagtactattaaagtgacagccctttttgttttctgtagttgcagaaagcaaggaccaagtgtttcagccttccacagtggcatcttcagagggagctgtggtggaaatcttctgtaatcactctgtgtccaatgcttacaacttcttctggtaccttcacttcccgggatgtgcaccaagactccttgttaaaggctcaaagccttctcagcagggacgatacaacatgacctatgaacggttctcttcatcgctgctcatcctccaggtgcgggaggcagatgctgctgtttactactgtgctgtggaggacacagaggcagggaacccatgaagagctgaacagaaacagagatcacagcctttgcaggaggcaaaacagagatgagcaataactttttcctccttaattcagtattacccaagctttttcatttggtactgctattaggaaaaaaaattgagtccagacatactatatattaacaaatgtctataaaaatatgcttttaatttttttttgagacacagtcttgctctgtcatacaagttggagtgcggtggcatgagcatagctcattgtaacctcaaactccagggctcaagggtagctgggactcagccttctgactaggtgagactataggcatgtaccaccatgcctagtgaattttcctcctttttgtagacacgagttctctctgtgtcatccagactggtctcaaactcctggcttcaagtgattctcctgctttggcctccaaaagtgttgggattacagatgtgagccaatgcacctggaccagaaaatatgtttttaaagggtgattatttcaaatagtcttcctgatatctgaaacacttttgactcattttcttgagatctgattagattatttttgtttttccctcataaaatggctgatgatgaacttgtgatagtagtaagaggcatgtccactcttccattttcttctcttttttaaaaattcagacaggctggagtgcagtggcatgatcatagctcactgcggccttgaacttctggcctccagtgatcctcctgccttgacctcccaaagcactgggattataggtgtgagccaccaaggccagtcaactctttcattttcttattgctgtctgtgcttaccttttaaatactatctgctaacttcagtctttttgcagcaatattttcaaaacatgtcaatttgtaaaggatggtttagttaacattgggtaatgtaataagaagtgagaaaggaaggaataaatgagtggctgatacctacagccctgcatttgaaatctcaatccgtgcctcagtatactttgcttataatctagcatacagtcctgttgagggtgccagtcaatgagtatatgaaatattagtcaaactgaatctccttcataatatttaaactaaaaacaaatgcaaatggaagtatttgtactcattgcaatgcattcttcccacactcctgttaattagcttggtcctcccaccccagatgtgtccctcccactttagagaccaatgccttagggtagcccagtggttcttaatatattttatcctcctagatcggaagttttgtgaaaattggatttgttttcttggggggccatattctagataaactcaatcagagtttgcaggggtgggacccagaagtctatattttccataaagctctgctggtgattgttttgctcagccagggttgatctgtgaatttcagattttggaccccaggtgtattactccattctcacgctgcaataaagaaatacccaagactgggtaatttataaagaaaagaggtttaattgacttacagttctgcatggctgggaaggtctcaggatacttacaatcatgatggaaggcaaaggggaagaaaggcaccttcttcacagggcagcaggaaggagaagtgccagcaggagaagtgccagacacgtataaaaccatcagatctcgcaagaactcattcactatcatgagaacagcatgggggatgccatctccatgattcaattacctcccaccgggtccctcccacaacatgtggggattattacaattcaaggtgagatgtggatggggacacacagccaaaccatattaccaggtcttgaggctttaaccactattctctacttccttttaggtagaattttagtaacagagaagggcttcaggaagtgaactgtacagtgctattgcttgcttacacagtagactttcagcaaatgctgacatttggaataaaaagtgaagggcaagatgggcacgatgggttatacctgtaatcccaacatttgggaggcggaggtgagaggatcccttgagcccaggagttcgagaccagcctagtcaacatagtgagaccctgtctttacaaaaaataggaaaaattagcctggtgtgttggcatgtgcctgtagtctcagctacttgggaggctaaggtgggaggattgattgagccagggaggttaaggctgcagtgagccatgagggcaccattgcactccagcctgggtaacagcaaaaccctgtctcaattaaaaataaaagtggccaggtgtggtggatcatgcctataatcccagcactttgagaggctaaggcaggtggatcgcttgagctcatgagtttgacaccagcctggtcagtactcaaaataccaaaaattacctaggagtggtgtgcacctgcagtcccagctacttgggaggctgaggcaggaggatggcttgagcccgggtggcagaggttgtagtgagccaagatggcaccactgcactccagccagggcatcagagtgagaccctgttaaaaaaaaaaaaaagaaaaaaagtgaagagcagattgctgatgacagaagaaaaaaggtattttagtaatatcaattgtcatgaaactttgccaaaatgtcataagattgattcttaaatgcaaatttttaataacacccaaatatttccattggatataagtgtaaattggtatgtttgtgcttgtattacttctttaggcatattatattttgggttgttgcttgcttaaaagtgtgttaatcttattttttaaatcttatttatttattttttctaagatggagtctcgctcttgtcacccaggctggagggcagtggcgcaatctgggctcactgcaacctccgcctcccggcttcaagcgattctcctgcatcagcctcccaagtagctgggattacaggcacatgccaccatgcccagctaatttgtatttttagtagagacagggtttaaccacgttggccaggctggtctcgaattcctgatctcaagtgatctgcccgcctcagcctcccacagtgttgggattacaggcgtgagccaccacgcctggcctaatcttactttttaatcaaatgaaattcttgagaagaggaagcatatgtgatccttctttcaggttgtcctgcatagttctgtgtgcactgtagtggctcaataaatcatgaacacaggtgtgacctcattgctttggcaagagagaccagagacagaaaattccctttggttacattaggaagttctttccagttcacagaggagtctgtacatgtggtatactgaaaaccctaccttttaccctggtgttttgattctataattcaaactgtcaacaactagtcttctaccagattttttccagcttacatgaagaacactaaaggcattattatccaaaggggaaaatggaaaaagagagtgaaataagaggaaaatgcagttgatgcatttttcttacaacgaagagagcagccatgaagtcccactcttaaagttataacattatgaagctcccagttcagtggtgacaaggacagaaacatccacaggagaataaatttttttttttactcccaatcctgggagttcatatatatgaatcgaaaggtaactgtgtctgtcactggctccatgagaaatctgaaagacttgccatgccttgctactgtatcctacgtcctctgacttcactgctagttttcttttcttttttttttttttgacggggccatgaaaaccacctacggtaatcttctgtaccttctgaaaatcatggcgccacagagaatggggggtatttggaaggctgtgttgctttcattttcttcctaggattagtgttatgggttgaattatgttccctaccccttgccccgcaaaaggatttttttttgagtaggtgacacgggtaagtcctagccgtcagcacctcagaatgcaaacttatttggaaatagaatctttatagtggtgataaaattaaagtgaagtcaaaaggatgaaccttaagccaataatgactggcgtccttataaaaaagggagatctgaacacagagacagacatgcacagagggcagacaatgtgaagaggcacagggagaagatataaaaaatgtagtatttttcagaggtttgagatagcatggatatagctgggaccagaacacagcaataaactgtgtggggagattgaaagtcagatgtgaattaaaatattttgcagatgcttgtgtagatagataatgatctcaaggtccagtttacatttattttccctgtgataccttggaactacataaattgcctagaaattaggcgtaatctcaggaaaaggtaggaaaactctgatttgactgagatttggtttctgatacctggtagactatagctttaaatagaaattaaatatagttatgaaaaaagtttttttccctccttcagcatctacttttgtgtattgaaattatacttacagatgatttaaaactttgctttcttggaaatgtatgaaatgatgatgattttggtaaaagggataatactgtctcaaaccacataaggggaagacactgtcaataggactctcatggatgaatagtattccctttggactcatttttgaaaacctgaacaataaaatagaagatttaaaagctacacataaactctcacaaattcatctgtgacatcttttgcatgatctttgttctagtatttaactgaatttttccataatattctatagccattttctgtcctgctgttgtacattcttttaccagattatctcaaaatgtatccttgattttgttattccataaataaatccttcaggctttttaattttatatataagaaagaaacaaaaagaaaaacagcaaatctaaatagaagtgccctctgcttagtaaagctgtcatattatgaacccaatgaaactttgctgctttactttctgctgctacatcccctatccctttgggtcaccaaataagtttattctctagcctttaagacctgttggcattatctcctgtatgagttgtatcagattattttctctgcctgaaatgccctctttctccctttattcagattgtagcccaacctctataacttcttcagctgaggactctctcccttgtttgtgctgctatagtataatgatccccaaagtgtttgactgtgtgctattatcagtaaagtatgttactcctccaacatatgcatatttatatgctcatagattatgatcgtgtgtgcaacaaacaaaaatagaaattaggaaagtttgagataaatttaatactaaatgttgtgattttcttctcgcacgcagggggatcatcttgtgtagcacatccgtgtcccttctacaagatgaactaactagactaacttggtctttaactagttggctaaatttcttaaactttgtgaaactctttcttctctcatttgcaagaaatatctgtaatgatttttctattgatataattcttgcacattttacttcagatagttaactgttcttcccctaagtgttcatctaccaaaatgggtggtaagtttctggagggcaaggattatgtcttgttcctctgtttatttctcaatgcaaatggtatcttacatttaacaggtactgaaaagtgatttgtgaggatcaatggattcacagggttttctcctggaattgtcagaatgccaaggcagttcttaagtagattcctggatgaggaaccctctctgcaaaggacaaccatttgtgatgaatgaacggaaacagagctcttagatcattgcgtataagatggcctctcattacatggatttctgctagctctgtgtacttatttaaagtttcaatcacctgacagttatttattgggtgcccataatttgccaatcacatgtttttttctttatatctgtcccataaaacaaaacaaaacaaaacaaaacaaaacaaacacccatcctcagagcttctctacaatagacacacaccaaactaaaaataaaaatgcatgaatctcaggaagagaagttctaaaaaacaatctagaccatctgcccatgggatgcttgattttctcaacagcatcacatcaagggaattgccaatattttcacaacagcttcttgcaggagggttcttgctgctcccatactgtccattcaaactccaggcggctgtgagttgaaaatctattattctttatgttgaggaaacatctgtgttcctgtggcttctacacctttgggaatctaaaagagttcacatctctcctttacacattttgaaccagatacaacatttccacagagcagtttttttccatattaaatatttgtaagtttcctaaccattatatatatatatatatatatatatatatatatatatatacacacacacatacatatgcgctacaattttgatttccctctttgttgtacattttaaaccgcttccagttggcttgtatttcttttaatatagaattcttagaacttaataaaacacttcagatgtggcttgacctattttaaactacaaggaaagaaggaggaaactggatgaaggtgaggcaaggtaaatatattaaacccagagacactacacaaatcttttcattccactgagacatggatggccactgattcttgatctcctttgtttggaggtaggagggcagaagttcaaattacagatttgtccccacctttcttttgagagttccctaacttatgtgaagtatgatttgcttagttggactgtatattttgtcagtttcatggaaaaagcactgatttctttgttctaacaactttattttgtgctgatttttctttgatacttctaaaataaatgtaatgtacatttcagagtctaatatttgcaaagggatttgtcattagtttacatgagccatttcttgtctcttgtgaaatcaatgatatttacagagttctgattttttttttttttttttaaagaaacaaggtcttgttatgttgctcaggcttgccttgaactcctggtctcaagggatcccgcccccacccccgccctgtctcagcctcccaagtggctgtgactatagtcatgtgccaccgtgacaagctaagagttctgatgtttgcaagtagtttcttgagaaaggcattggcagccttggtgaggcatctggagtctcagactgatactccttgacactgctctgtgctactctaattgcccttgtgttgtgatgtgcatgtttcagtggtagttaaattaaggagtaaaggaaactaccctgaggggagcacagacatctacctgcagcattttgggcacattccccattggcccacccatctcatatttgactgacctctaaatggatagcactacacccagtttactatggtttggagaaacagttcatgtcaactttctgtgaatgtcatggttctttcaatagaaatcggagagttggacagaatagctaaaaggtggtccagactgggtgcatatggcaaattgataagaaagagtcaagttttcatcaaactttctgtacataaacctgtaccagcatagcagtgagcaagaggtgcaggagaaggtggatgacctttgagtgctggtgatttagaattaattatccaggagttgttttggttcagtggcacatacatgtgggatcggcatttggtataatgcactcaatggacaatatgacctctaaagttctatttaacttattcaagcttgattctgtaattttattatgataaggaagctgctttccaatattatattgtctttaatagaaagcaaattaccaaaattgatattccccctatatgatttaaaggaatatgcctttgaagtcggtaaaatatgggttaaaaatctttgttctttttcttaaggatgatgagcaaattattcaattttcctcaactgtggtcccctcatctctaaaatggggcatcttaggaagagtaaatgtgacaaagaatgtaaagggtttaatgttatgctcacggtgacatttgatgaataatttcttaattaatctcagaaatcaaagcagataagctgaatagctactgaggctatgttgttcaattttgaaatttcagtctaggcccttggaattctttgggtgctgctggttactttgtgtgcagtgcattatatggaggtccctgaatccttctctatctgctgagcagttaaaaggcagttctttaactggaagcaaacacgaagactaaactgtcctagttttgaggaagaataagaaggaggaggaggaggaggaggaggagaaggagaaaatgaagatgaagaagacgagaagaagaagaagattaagaagaagatgattaaggattctgcaacagttctgtcattgcaaatgactacccatttctaaccacgacataaattcagaggaaaactttcctctttctatagctgaacatgcttaattaataaatatggttagttccttccataagtatcctttagggggagaccactaaacaatcaaccatttctagcacaaaattaaaaatatcagtctcctaaatatttagttcacttgaggctcttggcattaattattaaatggatgaaggcaaacaatatctcagccacttgcacgatctaggcataatcttgtgtgctgtatctgtagaggtcagaggaagtagggattggaaaaataatcaaggcactgaagtctacactagactactgttttagttaaacttattttatttgcttttttatgttgatcatatcatatgttgatatatgcccatatatgcttttatagggcagcaataaactccagtgtcaggaggctggacagtctctgttttcctcttcaggtctattctatcctgctctgtactaaagtctatattagactattgttttaaacttattttatttgtctttttatgtttgtcaaaatgcagtatagctatgcccgtatatgcatttgtagggcagcaataaactccagcatcagagggctggacatttctccattttcctcttcaggtctattatatcctgctctgtaccccaggaggctgacttctatacgttatgtggactggtctcccatgtccattggcatctggttgggtttaccccagtgggaggtattagcaggagagagtggtcaagatatttgcattttaggatcctttctttcctctactgaagtttacagctcctgttgggtctacccagaatatggtcaagaagaggtatttagactgtaaagggtcatgtcgcctttggcctgtgattagttacaggtgtcctgagattagggtaatttcatcttctcccgtccctttgggcctaggagtggtgaaatcttctggctgttattagccccaggtgcttcaccttcccttgtagttttccctaaattttgcacatacacttaaaaatattctttttgttaagctttttttcaatgattttctcgaggcgattgccaggaccctcaaaaagacaacactaacactcattttaggcttgaggcagagagagaagaaagagaagaaattcactatatgtttccatttatgacaagtctctctggaacttgaagattattgtttaaagacagtttaccaattccaaagaaaaacattattatatggctaagttttcaattattaaatatgagatctttagcaaagcttttagaaagaattatgttccactttttttctgattcaaagcaaagagatttttcatcctttcctcagaatatatagtgaacattatttggacactattcaaaagaaacagaaggcaaatcagaggaacaacttctttatattgatacatgctttttacattaaaattaaaatctatcaaagaatcactcagttgctattgttgcctttttttagtataaaactttagcatgccatccgtttccaatgaaccccttttccccatcataatacatcaagtttcgttaaccatacattttttgctgaatacgtacttcatttgaagtctgttttaagtaggctctgcatgtggaaagtacctgttttgcaaccccttctcagagtttcatttttttgttttatatctactgtttaatatgacaaatgctccaaaaatatttataacacctattcgtacttttctcactctaaaaatgtttaaagagaagattcaagtttctttttgccctaaagatcattatgggatgggctcctaataggcccaacgtggagaaaattctgagttatttttggtcaaagaggtttacacagaagccagctctgaattacttctaacgagaagagcaaggctcctgttttcgcctgtcatttatcttctcttgccttactcttttctcctattttgctttttcttatctctcactttaaatttttctctccctcttgatgcaaagctatattttcctttctttttctgtgcattttcccatcctatttcccttctttctgtctctacattatcttaagagagcacaaatcatttacagcttgatccactcagcccgaatcttttccactttgattcacaaacttctatttcttctcctttgaacccctaatttgctccctatgtccctcatggagcgtgtaaccatccaaaggttggcccagggataaggccaggaagcaccagctgcttgacagtaaagtcgctggtcctacgtgtgggctctagggggcgatgcagtgtaaggtctgtcctgggcataggcggagcggcagtcttgctcctcacagagctttgaggagctggatcaaaattgtgctccacagagagaagataccggtgtcgggaagcaccagtgccctgaggaagggccatttccaaaagccctgtgctgacacagggttgctggttcctcttcaagagcccactctctggggtggggccatatctccagcagaggtgggctggaaaggacccccccaatcccgcccgccgtgagcttagctggagccatggcctctgcacccatctcgatgcttgcgatgctcttcacattgagtgagtaatatccccttcccattttccactcgcatgatccacttacatgctctccagcagcttcactgatgcagcatgattaatttacaggtgggctgagagctcagtcagtggctcagccggaagatcaggtcaacgttgctgaagggaatcctctgactgtgaaatgcacctattcagtctctggaaacccttatcttttttggtatgttcaataccccaaccgaggcctccagttccttctgaaatacatcacaggggataacctggttaaaggcagctatggctttgaagctgaatttaacaagagccaaacctccttccacctgaagaaaccatctgcccttgtgagcgactccgctttgtacttctgtgctgtgagagacacacactgataggggctgcagggggagcagaacacaaactcttgagtctggtaaagcccattttcttgaagtctttgttccttcacatgagaacggtgtgcttccaggatatgtcacttattatgttaaactacaatttaaaaccatagaatttgctcattcagcaagtgtttattgagtcctgatgtgccaggtactgggcaaagcaccggtcataaaaaggtgaaagaagtgtaaaacaaatagaaaaaaacataggggaaaattaccatgacattggtctgggcaagaagttccttccttccttccttccttccttccttccttccttccttccttccttccttccttccttccttcttccttccttcctccctccttccctccctgcctctctctctttctttctttctgaaaaggggtttattttcaacagacatttctttttataccgaggtgaaatgtcatcatcataataattttgcaatgttacataccctgttgagaccattaaaaaattaggttcatggtatacacgtccaagtttgttacaaaagcatattgtgtgatgctgtggtttgggcatctattgatcctgccacccgaagagtgaacatagtacccaggagaaagcttttcatctcttgtgagcaaggaatttttggatatgaccccaaaagcacaggcaacaaaagcaaaaatagacaaatggggctatattaaactaaaaagcttctgcacagcaaaagaaacaataaatagagtgaagggaaagcctatggaatgggaggaaatatttgcaaactctacatctgataaggggttaatattcaaaatgtttaagaagctcacataccaaaaacatccaaataacctgattaaaaaataggccaaggaactgaatagtcgtttctcaaatgaaggcataaaaatggccaagaggtatataaaaaatgctcaacatcattaattatcaggaacgtgcaaattaagaccaccattagatatcacctcacaacctattaggttggctattatcaaaaagacaaaagataacaaccattgttgagaaggtgaagagaagggaactcttccacactgctggcaagaacgtaaattccataatgtgcaaccattatggaaaacagtagggaggtttctcaaaacaccaaaaatagaactactgtatgatccagcagtctcactattgggcatatatccaaagaaaatgaaatcagtatgttaaagagatatctgcactctcatgtttattgcagcactattcacaataaccaagatatggaatcaatctaagtatctatacttagatgaatggataaagaaaacatggcatataaacacaataaaatactattcagtcttataaaaggaagaaatcctgccatttgtgacaacacaattgagcctggaggacattatgtcaagtgaaataagccaggcacagaaagacaaataccacataatctcacttatttgtgtaataaaaaggttgaatttatcgaagcagaatagaattgtggttaccagaggcttgtgaggggaatggaaagggattggagagatgttggttaaaggacacaaaattttaattagataggaagaataagttcaagatatctactgcaatggtgactatagctaataataatgtatttgcaacagaattttttttttttttttgagacagagtctcactctgttgcccaggctggagtgcagtggagtgatcttggctcactgcaacctccacatcccaggttcaagctattctcctgcctcagcctcccaagtagctgagattacaggagcccgtcactaaccctggctatttttttgtatttttagtaaagatggggttttaccatgttggccaggctggtctcgaactcctaaccttgtgattcgcctgcctcagcctcccaaagtgctgggattacaggcgtgagccaccgcgcccagctgcaacagaaatttctaaaaattgctgaaagtagattttaagtgttcttaccacaaaaaggatatgtatgtgaggtaatgcagacgttaattagcttgatttagccattccacaatgtacacatatttcaaaacattatgttgtataccatacatatatacaattttatttgtcagtttaaaaaagaattgaaagaagctatctttgatctctatgtgccaggtgtgtttccaaacattaatgaacgcatttaattctcacaagtattatcatcagcttcactttacagatgaagaagcaaagtcacagagaatttaagtatcttgctcaagtcacaaagttaataactggtaaattgcaacccaggcagtgtgtctgtagggcacatggtccaactactccactcctctgccagtctataggcttcttggggcaagagactgattttggtgatggtgtagccctaactccagaaagggtcgctgtcggaaaagtgttggttatatgaatgaacaatacactgacactctaaacagtttggtgtgtgccaagatagagaattcaaaaaatgctctatgagatgaggatataggaatagcttagctgtgaaagaagacagaagcagtctgtaatgggaggagagtttgaatcaaggaagggtataaacgtgtagttcttataaggatagttgcttacggttcctatgttcacatcttccttatgctcttgagaggaactggacttaatgcacttttctctctttatcttttcccaaatttgagtgtcgtgggaagggctctgtttgactcagtgtgagttaggtggcttttccttggactaatcagtggtggccatgggtacaggctgcttggattagcccagcttggcttccacctttggtggctgggggtgggagtgaggattctgcaagttagcagctctattttgaactgcctggttaaaaggagtatgtccccaaataggttaatttttacacagggatctacatctgtttattttttcccccaaatggatagccagtagttcttacaccacctcctgaaaaattcacttttgccccatagatttgaaataccatatttatagtacattaaattcctagatatactcagatctactttgaactcttgatttttatagttttgtgctagaatgtgctgctttagggagattcaccctgcagcctttggtttgtaccttgtgatttaccagccttcttttcctatccttcaatccatcacataccttgagaagccttatacacaaggatgtggacaccttagcccacatgtctacagtccaggcaaacagtgatcttttggccacccattgggcctagagttgtgtacacaggtgggatatctgcttctgggaagataatccttgagataggcccatgcagatcttaaaagtgtgtttggggatgtttgtgcagggaattctgaaatcctagtacccagaatatggtcaagaagaggtatttagactctaaagggctatgtctcctttgtcctgtgattttctcacagggaaagggataagaatagctgaataatagctggggtggaggcacagaactctgagcagggacgtcacttgctcaggtctaagggtggcagtgttctgtaccattactgccaaaatacatttgtattcatgaaaccatggtatctgttttagatttaagtatacagttgccataactctaggtaagctctcagccaccatcactgttttcactccaaaggaagttcatgtccacagggatatttttatcacattacaccattgacctggctgtgtggcctgtttctgcctttgatacttataaatacaatttatgcaagtcctgcaaaggaaagaagtctttctatacaattatgatgtatttattcatttagctattcacttattcactcaatgattatttgtggagttttgactatgtgcttggcattgttatcatccctgaagatgcagtggtgaacaaatctttccctccagtcattccccaggctgcacacgtgttcatatcacttccctacccaaacagaactacttcttagtcaaagagatacaactctcaagatgatttccttctcaggaaaattctccaaggttaagctaagccttagatattaatcttttgtcatgtggtagtgattggtggtggtggtgatgggaggggagttatgtagggaaatgagaatctatattttcccccttttttaaggtggctcagagggaacaactatgtctttttagaagttctgttttgacttaaagaaaagttagtctagcattcctttttcctgtttgttgggaaatactccttataaacagataaacttcaggaaaaatgagaaattctggaaaacttatcttcataaggtttatttttctccccccttttatatcacttcaagaactttgtggaaagagaactgaattaagaattagggagcataggttgtttctgattcttcctctaagtaactatgtgacattggacatgccatttctactctatgtgcctcatctcttaattaatgaaattgagataactggaaggattgttgtgaggattgctttatgtgtgacatatgtcttggaccccaaataagagtgggtatttaggtgggcagagcaatcagatacctaagacaccaacactgtggagcccttataactgccctgaactgctgacatttgaactgtatcatgataaattactttattttggcctttgttacatcagttggccctgtattctaatttaatcttcgatacctgaaaactgctttcagaaaaggagctaatattatctatgtacattgtagttaagttgcgtttaagcaccaacttaaaaaagctatttgtggaatcacagcttttgtccttgaaatatacttttaagcattttagagaaagtaaaggtagggaaacacgttttggggaagaaaagttgtcctggttttgctgagaacagtatgtagacagtcatcttctcatccatgtgagaatctgtctctgcctggatacaagggagacacctctccctgcagtcttcccatgctacattcagtcctccctcctctcatctttccctgattgtgtagtgagtttcactgggttctctgaaagaatctttgaattccattctaattctcaaaaattgtgcttctgtgatatgcaagagttggtggggttccaccatgaattccaggagaggccataggtaagctgtggtcacttgctgtcatcagcactgcagggatcccacacatatcctgcaaaatgcctccttctgcagtataagtaatgaacaagtattaagtaaagtgatatttcatttaactattaaattagcaattgtaaactatataaacaatattgacaaagagtaaatgggtactgaagtgtactattgatggcataaactcatatgatgcttttgggaggcaatctggcaatcttcactgtgtctcttttctcactttttacttgctcttttacccactgaagtgtggttttaacttccaccattggcccaaactattcttgccagggttaacaacagtttcttgggttacatccaatgaatgattgattattccctctttgaaacctggtcctctttcggtttctggtataccactttccctttaaaaaaaaagtttgagagctgattttcaatagatcacagtgagggagctgctctgctatgtgtgaaaccccagcctacctctttctttttgatgttcttatatctttggctgaacctgcactgtcttttttcatgggcttttcttctgctcactcttttatcgggaacctgccctgatattcacgtaggttcctttctatttttcccaagcgtcagccagcttgagaaataaagggacagaatacaaaagagagaaattttaaaactgggtgtctgggggagacatcacgtgtcagtaggttccgtgatgccccacaagccacagaaaccaggaagtttttattagggagtttcaaaaggggagggagtgtgcgaataggtgtgggtcacagacatcaagtactttacaaggtaatagaatatcacaaggcaagtggaggcagggtgagatcacaggaccacaggaccgaggtgaaattaaaattgctgatgaagtttcgggcaccattgtcattgataacatcttatcaggagacagggttttgagatcaaccggtctgaccaaaatttattaggcgggaatttcctcttcctaataagcctgggagcgctatgggagactggagtctatttcacctctgcagtctcgaccataaaagacaggtgcacttagggggctgtttataagcctatacctccaggcgcgtattctctttctcagggatgttccatgctgagaaaaagaattcagtgatatttctcccatttgcttttgaaagaagagaaatatggctcagttccccccggctcaccgcggtcagtttaaggttatctctcttattccctgaacaattgctgttatcctgttcttttttcaaggtgcccacatttcatattgctcaaacacacatgctgtacaatttgtgcagttaatgcaatacttacagggtcctgaggtgacatacatcctcctcagctgacaggattaagagattaaagtaaagacaggcataggaaagcacaggggtattgattggggaagtgataagcgtccatgaaatctttacaatttatgtttagagattgcagtaaagacaggcataagaaattatacaagtattaatttggggaatgagtaaatgtccatgaaatcttcacaatccacattcttctgccatggcttcagccagtccctccgtttggggtccctgacttcccacttcccgcaacactctttaaagttggtgttcttttttttttttttttttttgagacagtctcgctcttgtcgcccaggctggagtgcagtggtgcgatctcggctcactgcaacctctgcctcccaggttcaagcgattttccttcctcagcctcctgagtagctgggattacgggtgcctgccaccaccacacccagctaatttttgtacttttagtagagatggggtttcgccatgttggccaggctggtctcgaactcctggcctcaggggtccgccagttggtgttctttaggattcttcccttgacctatttattttctcagtcaaaaattctttctgggtaatattatccatgctcatgcttccactattatttgctgattattttcagctcatatatctcttctgagcttcagtttaatatatcaaactgggtttttgacctgtgtgaattttccagaagcaccttaaatcaaatggtgcaaagcttagctctttatctttcttcctttctcccccacttcaccatatgaaacaaaacaaaacaagataaatttgctccttcttttgtgtttttcatatcaaacaacaggaccatcatctacccaagtgccatccactctcttgctccaagtctgtccagatgctgtgccttctgcctctttctattcagctcagtcttcatcatgctcattcttcctcttctcttaggttttagtttaggtgagtgtcactccttctgggaagtcttcctgcagtcctacaaccaaaaccatttcacttccttgtgttgctatagtactctatgctttccctactatggctgttatcatgaggactatcattgcttttaaaatcctcttccttctcactagaccactgggtctttcttgtcattgaatggccagtgtctacctcagtgcctgactgtaaaaggggctccacaaatatttgtttattgaataaatggatacttcccaagactcttaaaatgttcttacacgaatccaggaaatcctctttgcagaagctagtctaaataaataattggaagtttagacaaagatttatgtacaaaggtttttatgatagtattctttctaaaatccaaatgtctaatactaaagaaattggtaaataagttatagcacatttgtaccatggactatgttgaggctattaaaattggatttttatgtatacttgttgacaaaaaaaaagtttggaaaagaatattaagttgaaaaaacctccagcatgtgcaaatgtgtgtgtgttcatgtgcacacaattcaattgtgctaacaatagtcatgcaaaaacaaaggattaaaaagcggtatgcctcaatattatcaatgattttttctgggatatggtattacacgtgattttaaaacactttcctatattttccaaattctgtatttagaattcattattcttctaaccagaaaaaaaatcccacttaaaaagaatttaaaatatccctcttgtagttggctattgctatagggcgtggttttctttcataaccttaggaactttctaaaatttgctttaacaatggtctaaattttttattacaatatacataaaaaacaacattaatgtatgtgatatgctcctatgtgttcacccaaatacttttgaacaccaaaaaatgttttgcaaaggagtatatatatatcagttaaggttctccagagaagcagaactaataggatgtctatctatctatctatcatctatctatctatctatctatctatctatctatctatctatctatctatacataaatatttattggaatatgtatatttattggaatatacgtgtaattattggttatatataaatcttggtccaagtctaaaggctcaagaatcagaagcactgatgttagagggcagggaagatggatgtcccagctcaaggagagagagaaaagttgtccttcctctgcctttttgttctattcaggccctcagtgaatcggatgatgcccacctgcattgattagggtagtctttactcagtctaccagttgaaacgtgaatcttttctgaaaacaccctcacagacacaccccacaataacattttaccagccacctgggtatcctttagcctagccaggttgacacataaagtcaaccatcacaacctacttaacatataatatataatataattattagcaccatatattagtttgctaaggccgtggtaacaagaggccacaaactgggtggcttaagcaacagaaatgtattgtttcacagttctggaggacaggagttcaaaatcaaggtgttggcatggttgtttccttctgagggctgtgatggaaggacctgttctacgcctctgttcttggcttgtagatggcatcttctccctgtacctcttcaaatttttcttctatttttgtccatctcggtgtccatattccccctttttgtaaggacaccagtcatcgttcaccagtttggattcgagcccacccaaataccacattttaacttgatttcctgtaaaaactgtttccaaataaggtcaccttctgaagtactagggatttgaactccaatatgcatatatattttttgggtgggaggaaaacacaattcaacccacaacacaccactaccatcagtaattactttcattccataggctgagggatagaaaaacttccagtgtttctacctccagttgcctggtatccagtaatattctccaaagtgaggtaacaggtggcaacacggaaacttcaagttccgttttttggcctgaaaaaggaagaccattttggcttggtgatatttcctgcattaaacatagtttgtatttttttttttttttttgagacaaagtctggctctgttaaccagcctggagtgcagtggcgccatctcagctcactgcaacctccgcctctcgggttcaagcggttctcctgcctcagcctcccgagtagctgggactacaggcgcgcgccaccaccacgaccagctaattttgtatttttagtagagacggggtttcaccgtgttagccaggatggtctcgatctcctgatctcgtgatctgcccgcctcggcctcccaaagtgccgggattacaggcgtgagccacagcgcccggcccatagtttgtatttttatagaacactctcgtttagaaataacttacttatgttcatttaatccttataatctctgttgccgagatgaagaaattgtgtctctcaaatggtgatttgaacaaaatctcacagctatcaaatccaaaggattgtttcaattcagtgtgtctaacttatcactcagtgttttcttccataactgaaaatagacttcatagtccaaaccaagctctctgctattgcgtttacaaagaaatgtgacgttccataaattgtgccgatctgagacctactgacttgtgtgaaacattttttctgagtatagttaccacaagaggtcgctgttgcaacgagttgcgtttaaagggtaacccatttattttcatttctgtacaaggtgttctagtatcttcaggtccctcataaaaacatctttgctccttcacttgttactgaggaaagcctggttatttatttcatgacctgtgatagctcctctgtcaaaatgttactagaagccatcaacactcactgattttttttttgcatgggaaaatggaaaaattgctgattcagaatgctttcggcaattctagacctagaagaggcacctcccaaatattttccagtgatttttttcattcctatattataagagaaaagaactcaaacaacataccactatcttttccacattaatgtgagtatgtaacaggttttgtttctagcattcggctgattcaatgagtactactgtgtcttttggattcaatgaatactactgtgtctttcggctcttttcctgaatggctttatttttcttttcagtttttgtgcttctgttataggatttatactaattatttcctgaaggaagtgtgtacagtaactacaaaaaattagatatataatcctacacgactgccttctactagccatggtactctgcgctctgaatcagatgagaagaaagggaaaggaactataatttactgttgactacgtgccacagattgaaaccctgaaatacatattattgttcccattttacagatgaagaaaccaagactcagaggagtgagctgcctgaggtcacaaggtggcagagttgagatttagatttagatctgtctgacacagcctgtgccttttcttcttgttcaccttacctcctccttggttaagtgagtgattccagaccaaatgtcctatcctagctggtcagcagggactaatgagaggtttgttcctctgttaaatatctgttacacagggtctgagaagaaggtattagttgtggacttagtgggattataaatgatcccagggaatcaggagatggaatgtccagtccagactgcctcatttgctctttcttggaataggattaggaatccctgtttcttcttggctaaataggggtcagtggagcactgcagggcataaagtaacaagtcaggcaggttacacttagaccatgactgtcaatgagtccatgagtgtcagaccgactacagtacatgaccaccctctcgggctgtggaaagtaatgtaatggggaataggagcccaatgtaatctaccttctcatagctttgcctcatttggaccaaatctttaagggattagacctctgcaaagatctaaaatgaaattcaggctgctgtgcttcagtaccagcagttttcactccctactcttcttggggctttagctgaactttgaggggagccctgctctgaggagctgctgccctgctattggctgctgtactggggcagcctgagtgacagctgctggtgtgggccctggcagttgctgctgggctcattgcagctcagacacagcaaaagagcctagaacctgggtcctagtttgcacctagaatatgaggcaagtggcgagagtgatcgtgttcctgaccctgagtgagttattttgggatgaagaggaatgggatctgggcctgatgatgctggaaaggaatctggaactttgcctgctagcagttgctctttatccaagatgtagagggatagcttcagggttccatttttctccaggcagctcctgagcatttatgtgagatgtgtctcagggcagcaaagattttcggggtttctaatccctagggtctatccatgggagggagatagtaaacctgacacttctgtgtatgcctgggataaatatttttgtactgaaacataaatgagaagtaaattgtatgtacatgtatatggcagggaagtagagcgtggggatggatttgactgtgagagggaaccgtggggctactgagtgggaccgtctaacttaccttgctttcaggataggggctaggattgtgttttactcccataggtactttgagccttgctaagaccacccagcccatctccatggactcatatgaaggacaagaagtgaacataacctgtagccacaacaacattgctacaaatgattatatcacgtggtaccaacagtttcccagccaaggaccacgatttattattcaaggatacaagacaaaagttacaaacgaagtggcctccctgtttatccctgccgacagaaagtccagcactctgagcctgccccgggtttccctgagcgacactgctgtgtactactgcctcgtgggtgacacacagtgagacagatgggcctgcacctgtgccgttttcctctgtggggtgggagtcacagcctagaaagaagtccaaaagtgctttctaaaatttttattttcaaaaggtattagcaaatttatgtattcttctactatttgcaaaatcaatcttatttattttttaaataggtatttcacttatgtgatctaaaattaaaaaagtataaaagggcatacagcatgatgtcttccttccaccatggtccctgagtactcaattatcaaagtgaggtatctgtggtatttatactattgttgctaagttcactggtactcctcagtttgtgtgtatagacagacacacactacatatactttatatgcataccacgcacagtcaacatgggcaatatgcttcttagcttttgaaacatttagcctaagtatcaggttattatttatagctgcacacattttgaacatttctgtggccatttccaagtatctacatgctggtttccatgcgtcccctgagattagatctctcactctctctgttgcctgtctttctcttttcttttgtcccacttccctattgtggatggtatgtaatggaaaatggaggtgatggtagaggaggagatgggagagaatttgtttctgatttgcattgtagactatttttgaaacatctaaatcagaaatggattctggatcattattagtttttaaagttgggttctttgaggctccaaagagagaagaataacagaaaatttgctgaaaatcctgcttgggctcctgaggcttcattaggatcatggggtatgtttttgtttgtttgttttttgtgggatgttgtctctgattttgatcacaaggaaagcaatatttgataatttttttattgagaatgagaggatcaggctatgtggcaggaggaggtttccatctagttcatctgagggtttggtgggggagtagtattgtggaaagaaaacaaacatttgtagagtattcgagcctatacactcatctcctttgtctgacttctctacacagtgacgaggagctggcagaaagtgggagtcctggtccccaaatgtccaggatgcagccaactcttctctgaagtgctccactatttccagtacttcatgtggcacagacaatatcctcaaaaaagcctagggtttctgattttcatattctcaatggagaaaatgaggaaggaatatttacagttcatttgaataaagacaatgaatacacccctttgcacaaaacagacccaaaggctggcgactctgacacctacatctttgtgagaagctcagagtgattccaaagtccctggagagcctctgcccaaagccgcactccagtcataagagttgagagagtgggatagagggacatctctgtaatgttcctgcctacttatgaaaatcaatacccacgtatgagaggctgtgtgggattatctaaagaagatactatactattctgtagataattgatctggaaaaggtggaatattggattggaaaatttcaaaatgttttctacccacttggagttcatcccatgcctgctcttgggatcttggttggatgatgcctttggggtagtccagaggaaaagagctgtgctgtggagatggggagccgggttacggtccaggttgtttcaaggaggaactgactgtgaggaaacaacacaactagcttttgtttcaaggtctgcttttatgaacaggtatctgtatgttagccattttggaagaaagagttgaacagccactgagggatggtagaaggggcactctaattctagttgtactttatttttactacatgctctgggcagcaaaacagactggaaaaataatcagctctaaagccaggcattcctgggtttgaatctgagatctcctgctgtaaagagtttgaccttagtcaaatacttttggcatttgagctttaatactttgtctataaaatgagggtcataatactatttttccagggttcttctgtggttaaaagactatcactaagaatgtcctggtttaatcagcactcatcagattaatgctatctatatcctgcattatcattgctattaaacctcacctgccaacccaaaaagctgtttggaggatgacatcacataccgggtgttcagactcttcagaaactgaaaaagacctgagccaatacaagaacatttttttgggagttaaaactcttggtctgtgacaaaaagatcaataaattgatcaataaattgatctgctatttctctgtagaaagatcacatgatttttttaaacaaaatgatgtcccctcagaaggggagatgttgggaggggaaagggagatgcaaaattacttgttgggtacaatgtacactacttgggtgatgggtgcactaaaatccttgaactcaccactatagaattcatctatgtaaccaaaaaccacgtttacccctaaagctatgaaatagaaaaaaattttaaaaatgaggccagggtcataccattatttttttctctgagagagaaacagccaaaattatttcatttggaactcattagtacatttactcagcaaatgtttattttgtattatgatgtgataggcaatgatgtaatggaggaagtaccttattctccaatatagataagttttctgcacaaacgcaggttttattcttctgtgggcagacaacacaaacaaagaaacaaatgatttccaaatataagtggcatttggaaaacaaaatagggtaatgtgaaggagaatcatggtggttatggaggtcatttagtggtgacatttgagctgaatcttgaatgacagaaaaatgacaaaaccatttaagacctggggtaagaaagagttttcaaatgcaacaatggtccttaggcagagcatgtttgctgcatttatgacagaagctggtgttccctgaatatagtgagaaggagagtggtaggaaataatgtcaaaaaggtagttatggacttgaaaatacaaagccttgtaaatcatggttagattcagattttattctacatgtattgggaagtatttgactacctaatttatattttagaaggatcactcttcgtgctctggggaatggctcatagggttggcatggggagagactagggcacaaagacagttagaatttgcaggggacccagtgagacctgatggaggtatagactaggtggtagaagtgggaatgaagaaacatggatgaattaacttatattttggaggtaaaaaatagatcttaatgatgatttgtatatggcagatggggaaaaaaagagagtcgatgatgacttttaagtttttggcttatgtagttacatggaagatgagatagggaattctgagagaggaaatatttttgattatagtaggcaggtaaaagtgtcatttcagatatgttaagttagagatgtctataaggcattcaactgtagttgttgaccagggagttccatattgagcctggagctaacagaggacatagctggcctatgggatagtgttcaagccacgcattgaatgagatcacttagggaaagagtgtggatggagaagaggttcttaacctgagcacttggactgtcagttgaggtttaatagcgaaggaaaaatcagcaaaggagatcgaagtctattagtgaattggaagggaagccaatagaatgtgctgtcacagaaggcaaaacaagaaaatgtttcaaggagtggtcaattgtgtctactatactacttctgggtttgggtgggagcttatagtgtgaaaagaagaattagtcagaagagacagatggaaaataacttcaactggaaaggattaatgatataatccattagtgttcttattcctgcatttaaaattttcatgaaattttatatattgactttttttcttaatggtttctggcgttggtatcacttaaaaaggcctttgttgccttgctattataaataaccttcaatttatatttcttctataattatgttagtagctttgttttcatacatggaaactttgtggacaatcataaacttatttttagaatatggagtggagcagcgacccagttttatttttccccaatatttattgagcgacgcatcctgtcttcactaatctgaaattgcgtatttctctaagaatttgggtctctgtcttgactctatctgtcctctcattgctatttgtgcacatattccatgctcatttaattacttgacaaattatttgataaattatttcagtagtattggacccagtttatgtactttcctgctttaatttggccattgttttctgctcagtgttaccgctaatcctccgggaaaactgcctagtacaaactgcattctctaatctggagagagaaagttaaacttctgtaggaaaaagttgcctcaagtcatagttgcgtttgctgaggggcagggaccactgaagtggctctcctgatctctcatgttacttgcaggcaaaggagaatttaccatgaaactcctcatttcagaggcattttccaaaatttctttagtgggaggtcctgtaatgctgcagttcccaacctttttcgcaccagggactagtttcatgggagacaatttttccacagaccaagggagtgaggatgatttcgggatgaaaccattagctcatcaggaattagttaggttcttataagaactaggcaacctagatccctctcatgcacagttcactgtagggtttgcgcttctatgagaatctaatgccattgctgctctgacaggaggcagagctcaggtaggttttatgatcagaaaaatattaaacaaaatttaacagccttggaaaagttatttataaacattgcattttatttaagaggttgaatatatacattgttttgccattttgaatttattagcagtgtggcaaagttagcttaatttgctattagtaaaactgaaaaccatttgataagctcttagaattatgctaatttgtctgaacggtagtagaagctattttaattaaaaactgtagctatatagtttaatctatatagtttaaccctcataatttgatagaattgagatcataggtgttgtgaagtatgactaatgccctaatataaataaacaagtaataaactgtcataaacagtctcaatatactctgaattctttcttccaacagatttaatttgtatagacaatagtaatacattcggataaaaattccaaatttgatttcacttatacttgttgatgtttgtaatgagagagtctttctgcgtatgttaaaattcatatgttaataggtgttttaaggagcttgtaaaaagagatgactatggaaacacataattaccctaaattttcatctttcatttgaaaacaaatttctcttaaatttaggatttttaaacaacctattatctgtctttgatcaaatggaaatttaatatatgtaaataggcaccgatgtttgcaagtaaacggcataaagagtggtaaagtaagttatgtgagggatgttttttaagtaacaagaagaaaaaatgttatgatttgtcggtaatatgtataaaataacactgtgaatatttgggaaatacacaaatgagaaaaaaatttaaaaatgctgtttgaaggttccaaacagtgacaaaatataagaatatactgcgggagatatgtcacttggacagaaacacactgagtgaagtccctgtatggtgtatggcacatggaaatgaagctcaagcagaaagcagctgtcttattggatttaggagtcagagtttggagttcggtgctgacagagtagctgaaattcaaggggggatccaggaaaagaaggatccacagtgtgaggagttacaaaatcttacaaagccacacttagttaggaactcggcaaaaataacaaaaaacaaataacctggctgggtgcggtggctcatgcctgcaatcccagcacttcgggagaaccaggcaggtggattggttgagcccaggagttcgagaccagtctgggcaacatggtaacaccctgcctctactaaacatacaaaaattagccaggcatggtggtgtgtgcctgtattcccagctactcaggaggctgaggcagaaagtacaactgagcctgggaggtccaggctgcagtgagccatgatggtgccattgcatttcagcctggtgatataagaaaccctgtctccaaaaaaaaaaaaaacaaaaaccaaatatatatatatatataaaatttattcacattatatatattttatatataaataaattattcatgtcctttactcactttttaaaccccataaaaaaagtgagtaaaggacctgaataattgtttaaaagaagacatagaaatggcaacaagcatatgaaaaaaggcacagcatcaataatcgttagagaaatgcaaattaaaagtaatgagataccatcttacaccagtcagaatggctattattaaaaagtcaaaaaaataacagacattggcaaggatgcagagaaaagggaatgcttatataatgttggtgggaatgtaaattaggatgacctctgtggaaaacagtatggagatatctcaaagcaataagaatataactactatttgatccagcaatctcactactgagtgttattcaaagaaaaggaaatcatatcaaaaagatacatacattcatatgtttatcacagaagtattcacaatagcaaagatatggaatcaacctaattgtgggataaagaaaatatagtatatagacacaatggaatactattcagccatacaaagaatgaaatcatgtcttttgcagcaacatagatagaactggaagccattatcttaagtgaaacaactcagaaacagaaaatactgtatgttcttacttataagtgggaactaaataacgtttacacatggacacagagagtgcataatagacactggagagtctgaagggtgggagagtgggaggggggtaagagatgagaaattacttaataggtacaatgtacattattcaggtgatggctatactaaaagcctagactttatattcatgtataagaaatgcacttgtagctcctaaatttatacaagttaaaaaaaataaaactatcccttggttgattcttgagctgtgcaggcataagacaagactctaagaaagtaagtagaaaacagcagccagatggctgagagaaaagattttagcagttaccctcaactagggcaatagaattttaaatgcaagtgctgccaagtgaaagaggttcggtaaaaacttaggctttctaatgaaaacccagaaggaccacgccctagaaataagaacaatactctgggactaaagggtataccctacaaataggtctataccctagaacaaggacatttaacaataaattaatgctgtgagtgtatgttatcagcagagtcatacttcaaaaattataaagtatttttgttaggtggtttgttgactgaagggaaatgatatcagatggaatttatgacccaaggaagtaataaagaacattaaaaatagtaactatgtggaaacattaaaaagagattacttttctaagtttttcaaaatacagttgacaaatgcaaaaataataacaatgtattacaccgttaataacatatataaataaaatcaacagcaataacacaaaaaactgaaggggcataggattaaactgttgtaagattcttgcattatgtatgaagccgtataatattaattcaagagagaatctgatgaactgaggatgcatatgataatctgtagataaacaattaaaaaaccaaagcaaaaaggtttagctaatagccaatgggggaaatagaatgaacgagtatagaaacttctcaaataaatcaaaagaagggagaataaagggcatattaacaaagactagaggaaaaacatagaaaatggattatcattgtagattcaaaccaaataaaaataattacattaaatgtaaatagcataaacattccaaataaaagggagattttctcaaactagacaaaaagacacaattgtatgtcattcacaaaaaatgtactttaaagacaaagatgagttgaaagtaagaggcaacctatgccatgcaaatagcaaccataagaaagctatgtgtctttattaatattaaataatatttgaaaatgaggggtgttatgagataaaagcattatttaataataaacagagggtcacttgatcaagaagagataatattctctaaatgtttatgtactgatagtagagttataaaatatatgaaaccaaattaacagaattaaaggagaaataggcaaatctgtaatcagagttggagactgtaaggctcctctctagtaattgatagaacaagaagacagaaagtcagtaaaaatatacaaggctggaacaatcaactagatctaattgacatttatagagcactatacccaccaagtgcactatatacattcttttcaagtacacacagaacgttcatcaaacagaccatatttttagatgtaaaacagtctcaatagatttgaaaggattagaatcctacagttttctcaccacaatataattaatttagaagtcagtaacaaggtatacagtagaaaatccccaaatatttgcaaattaagcaatatacttctaagtcacccattgataaaagaagaaattgcaaggaaagttagaagatattttgaagtaaaaaatgataaaatatagcccgggcgcggtggctcatgcttgtaatcctggcactttgggaggctgagttgggcggatcacctgaggttgggagtttgagaccagcctgaccaacatggagaaaccccgtttctactaaaaatgcaaaattagccgggtgtggtggcacatgcctgtaatcccaactactcgggaggctgaggcaggagaatcgcttgaatctgggaggtgaaggttgcaggtgagccgagattgtaccattgcactccagcctgggcaacaagagtgaaactgtctcaaaaacaaacaaccaatcaaaacaaacaaaaaaccccttaaaatttcacagaaaaattctaggctcaggtagcttcaaaggtgagttgaatagaacatttaatgaagaattaattctaacccaacacaaaacagaaaatagaaggagagcagtccggccccatctgtagtcatccacattgaatcatcagcatcagcatcaccttggaatttgttagaaatgcagagtcttaggccaaactccagttctggtgattcaggattctcattgtagcacagttcctgaatttgtacattttgttaagcaatgtggtcctgaagtgaggaagtaaacagaatgatgaagggaggtgggaaaaatatttttttcaagttctagttttttttttaaaaactagttaattgttttattttgttgagactctaaacttaccttagattcaatttttttaaatttgtgagtgagattgggctagaacagtggttcccctgtgggagcaattttatccttcaggggatattttggaatatctggagatattttttattgtcgtacagagagttgaaactggcatttagtggagagaggtcagagatgctctaaacatcctaaaatggacaggagagcttccaaccaagaattattttgtacaaatgttagtgctaatattgacaaactgtggactacagaatcctaagggtcctaatagctctgaaactctgggatccaatttaactgaaaaaacattcactgaatactgtgtgccaagttattatggtcttacattggtgtgccagcggggagacactgtcccacagcatgggcatacactatctggcccctaaccatgtataagaccattgatctatgccaaccagacaatacatgttcagaattttgaaaagaataggaaagctagggtcagccactctcatactacaaggaaatcagtaattcactctctgacataagtaagagtaggccaaggactgtttataactaacctcatcactcaggtgtactttctatttcatattattaataacaaattatactcattatcctgtatttataaatataatgtgcatcacatacagagtgaaagaaaaaatgaccaagggaaagaaaaagtagataaattgggagcaaaatgaacattgcttatgcatattgaaatccatgtcagtactagaaaataaagctattccatgccattgtttttgacaataaggcaacattttatgaaaaaatcataggggtagaaatttttccagaccataattgtgagtagtgttatagtaaataggtggaacagaagcagaccacctaacgactagtattttcaactctgcatgctatatatccgaaggacagatattgacctaaactgttaagaaaagttcaaggaaaatgcaactaagaaatatgataaaggatctgggaattatatgatatgatgaatgagtaaaaggataaaacaatttaaatgaaaactttaaataaatacatttgatgtatataaatctaaatacattttgtaatatgtacatatctttgtattttaggaaagtgattctgtataatcacacttgagatatattagttatgccatgcagatgaggaattagattaattttctacattgcttggagatctactaagtcaaagcacagggaagggactccaacttgtgaaaaacagtcagaccaagtttccctggacggagagtaaatttgccattgtcagtttcctacatatattatgctactaacaggcattggttttatgcttacttatatttattattacaggaatgaatcagaaagactaaagaaattaaaatagatgatgtagggtttggatagaaaatttaaaatactgaaggactttatcacaggggaatatccaaacaatgattttagcaatagacaataaaatcgagggaaaagtttttgggtctgaaatctgagttagcagtgcccagggtaacaggaggggaaattccactacagatcattcattattcagtgatcacatttgaggacaagccactcattctgacaataggaataagaatacacttggaaaagatgtacatttgtttacattatctcaatctgtagtctgatgtttcctgagatgtttcctcttttatgtcaatactttgcaataagtaagccacatatccgtaatttcagatgatctgttcttccagaggaaaatatttcagagtgcatgtcagatttttcatcacaatctataggctaaactctttcctttcattagaccaatattattaactcatggaagcctttctccctccttttatcttttattgtataatttagtcattttgaagaaaacaacactcatgttttgacctctggcactgtcaatttcctgggaatggcaagaacaggaacaaggccaggcttggaggagcagagcctgagatagcatgcatctgatatatttagtgaacctgtcttactccaatttttgtgcttaaatgctagcttcagaaagagttttcctctgtgagtgctgaaacaggatggctaatttggctgattgattttctggccaattcaaaaaatagtagagggataaggaggaaacgttttatacctcagtagctttgtagactgaatcatggcattttcttaatttcaagaagactgtcattaataaacacgaaaaacctctaacttcttcaaatatatttaacgtgactcagtagtgtgccgagaagatgcaatggaattctaaaacctacgtttgcactttttctgtctgctaatccacataatttctgactggaggtacacttggaatttactttatttggccttctgctgtttgatgtgccagaatctcccacagatacaggataattggtttagcgtttggggatctggccacaaggtggcagagcttctctgctcatgtagaatgtacgaaaggatccttttggttgacttctgtgagtaggctgacggcagaagcagatgcctctgtggacagtttaagaaaccacagtgctttggaggaaaggaagagatacttgataatatagctctcttggctggagattgcaggtcccagtggggagaacaatgaagacatttgctggattttcgttcctgtttttgtggctgcagctggactgtgagtcgagagcttttggggaacagagggtttagtaaatactcattagaagtctgaggaggagactcatctggtcttttccagaatgtctgaagttactacagtgaaaaaaataaaaaagcaaactccagagaatgatggcctgatgatcttgtctgacttttccttttgcacaggtatgagtagaggagaggatgtggagcagagtcttttcctgagtgtccgagagggagacagctccgttataaactgcacttacacagacagctcctccacctacttatactggtataagcaagaacctggagcaggtctccagttgctgacgtatattttttcaaatatggacatgaaacaagaccaaagactcactgttctattgaataaaaaggataaacatctgtctctgcgcattgcagacacccagactggggactcagctatctacttctgtgcagagagtacacattgcttctcaggcacctgtatcctgtacccaaacctgcacctgggactaaagccacactctatttcctttacctttaagtcagggattttgctgtaaggtatttttaatgtacggacattacaaaacatcctaaaaggtcagtttcaaaatgacttaatgattttcagaacattttgattaaactctttttgggagttaatgatttcttagttgatatcctggtcttagggttgactttatgggtgccataaagtcatctgaatgatttctcccctaccaaggacatcttggtgtcagagaatcctctccttgatggagtcttttatcttttaacattagtatttattaactttttctaactataaatatattaagtgcacggtataggaaaaaacaggaaattataaaatagaaaatcaaaatgtcttataatcctatcatacacataattcatagctaacatttagtattccttcttcattaaaaaaaaaattaggatcgcttttcctgtggcagcagctggggtgagaagagcagtggctctctcctctctctgccatggcatgtgcttgcccactgatgtcagcgtactctgagaagggagagtcatctggcaaaaatgtcactttgtctgccatattcaaggctcctattcgaccagatattgtgaactttgttcacgccaacttgtgcaaaaacaacagacagccctatgctgtcagtgaatcagcaggtcatcaaaccagtgttgagtcttggagtactggcagagctgcagcttgaattcccagagttcgaagtggtgggactcaccattctggccagggagcttttggaaacatgtgtcgtggaggctgaatgtttgcaccaaccaaaacctggctccattggcatagtagagtgaatacaaccccaaaacgatatgtcatctcttctgccctggctgcctcagccttaccagcactggttatgtctaagggtcatcgtattgaggaagctcctgaacttcctttggtagtcgaagataaagttgaaggctacaagaagaccaaggaggctgttttgcttcttaagaaacttaaagcctggaatgatatcgagaaggtctatgtctctcagcaaatgagatccagcaagagcaaaacgagaaaccatcaccgtatccggcgcaggggcgccgcatcatctgtaatgaggataatggtatcgtcaaggccttcagaaacatccctggaattactatgcttaatataagcaaactgaacattttgaaacttgctcctggtgggcatgtgggacatttctgcatttggactcaaagtgctttctggaagttagatgaattttctggcacttggcataaagctgcttccctcaagagtaactacaatcttcccatgcacaagatgatcaatacagaccttagcagcgtcttaaaaagcccagagatccagtgagcccttcgagcaccttgcaagaagattcatcgcagagtcctaaagaacccactgaaaaatctgagaatgatgttgaagctaaacccatacacacagatcatgcgccggaacaccattcttcgctaggccaggaatcacaaactctgggtggataaggcagcagccggcagcagcagcactagaagccagatcagatgagaagggggttgtaggcaagaagcctgtggtatgtaagaaaggaaagaaggccattgttgatgttaagaagcagaagaagcctctggtgggagaaaaggcagcagctaccaagaaaccagcagctgaaaagaagccggcaaaaaagaaatctactacggaggaaaaggagcctgctgcataaactcttaaatttgattattccataaaagtcaaatcattttgaacagcttcttttgaataaagacctaatcaaagaggcagtgaggaaaaaaaattaggatcacgcagacttgtattttaatttaatagtatattctaaccttaatgtttcacatttccccaatcttataaaaataaatttttaaatgattttgtgagtgattttataagccagcattttatttccactataatcgtcccatatatctgtggtgaaagacagtatttttctgaactcaggtgttaccctttaaatagtttcttacatgtaggaagttttaaattttctagaaatttattttttcttctgttctagaaataatttgtttcttcaatcacttatgctcttttcctcttgttctttcttcctccttgaagtgctgaatgttttcatttgtcccattttttttctatttttcacagcattttaaagggaaagttatatgtttctaacattgtatgttaaggtttctttcagcactgatgatactgggatttattaaatcttccaggagcagataaggaggtcagggttgatttagaattatttgccaagccagaagtcaggatgtcttttgctagtacgaatggtacatcacttatatttagatgccagttggagaacttgctggagaggtccatagtgatatccacttctgtgcctgaattgcttttatattaccatctctttgtatgattgtatcattctaacagggagagtagtttggtgacctatgttcagtggtttggttccttaaaaatgacaacgatgctatttggtattcctctaatggcatgcaaacaaaccatagtttctttttgtttttgtttttttttttttgagatggagtctcgctctgtcgctcagtggcacaatcttggctcactgcaagctctgactcttgggtttatgccattctcctgcctcagccttctgagtagctgggactacaggcgcccaccatcaggcccggctaattttttctattttttggtagagacggggtttcaccgtgttagccaggatggtcgcgatctcctgacctcatgatccacccgcctcggcctcccaaagtgctgggattacatgcgtgagccaccgcgcctggccgtttgtttctaagattaaaaattttgtttaaaaacagatgtttactttctgaaatgccttatagagatagttggtgtttagtttttcactttgtactcgttatcatcatcatcatcaccatcatcatcaagtggaagctaattcttcctcatataattcatgatcagaattaccctttattattttactctttgatctctttctactccccaggacccctgccactgctttataagtgttagtctaattgctcatttgtccttagagctgtctcaggtgagcttttatcatgtaggcagtaacacatgggttgattggactatccttcaagtctatcttctttataatatgtttaaaaagttgctcagtttttagggctatgacttgtgccactccttgcatctggcacttgtgtgtatttcaccgtttttaatgttttaccaatggacatttaaggaaaggggctaggtaaaatgcactgaatacacagatccatcaatatgtttgaaataatgcatgtgaagcacctagcatgatcctggcatgtactcatcattatttaataccaaatgggtactgacatatcagcagacttcatcctcaatatggatgtagctagataaaaaccaacagaatgtagctttctcttatttctggctcggtgtttcactttttctggtatcatgatgcccactaaattgaacatgtccaaaactagaatatgtcttttaaattttatttatttatttacttatttattttgagatggagttttgctctgttgcccaggctgcagtgtaatggtgtgatcttggctcactgcaacctccgcctcctgggttcaagcgattctccttcctcagtcttctgagtagctgggattgcaggtgcctgccaccatgcctggctaattttgtatttttggtagagacagggtttctccatgttggccaggctggtcttgaactcctgacctcaagtgattcacctgcctcggcttcccaaagtattgggattacagttgtgagccactttgcctggccaatatctgtctttttaaaaataagttttttgatatagacttggcaagatggctgaataggaacagctgtggtctgtagctcctagcaagattgacacagaaggtgggtgatttctgcatttccaactgaggtacccggttcatctcactgggactggtcagacagtgggtgcagcccacagagggcgagccaaagcagggtggggtgttgcctcatctgggaagcagaaggggtcagggaactcctttccttagccaagatagccatgagggactgtgccgtgaggaatggtgcactccagcccagatactgcacttttcccatggtcttcacaacccacagacccacaggagatttcctccggtgcctatgccaccagagccctgggtttcaagcacaaaactgggtggctgtttgggcagacactgagctagcttcagaattttttttcatacgctagtggtgcctgaaacgccagcaagacagaaccattcactcccctggaaagggggctgaagccagggagccaagtggtctggcttagcgggtcccacccccacagagcccagcaagctaagattcactggcttgaaattctcgctgctagcacagcaatctgagttcgacctgggacactcgagcttggtggggagacgggcgtctgccattgctgaggcttgagtaggcggttttacccttacagtgtaaagaaagccactgggaagttcaaacttggcagagcccaccacagcccagaaaggctgctgtggccagactgcctctctagattcctcctctctggcagaccatctctgaaaaaaaaagcagcagccccagtcagggtcttatagataaaacccccatctccctgggacagagcacctggggaaggggtggatgtgggggcagcttcagcagacttaaatgtccctgtctgatagctctgaagagagcagtggatctcccagcacagtgttcgagctctgcaaagggtcaggctgtctcctcaaatgggtccctgaccccgtgtctcctgactgggaaacacctcccagttggggccaacagacacctcatataggagagctctggctggcatatggcaggtgccctctgggacaaagcttccagaggaaggaacaggcagcaatctttgctgttctgcagcctctgctggtgatacccaggcaaacagagtcaggagtggacctccagcaaactccagcagacccggagcagagaagcctgagtgttagaaggaaaactaatgaacagaagggaatagcatcaacatcaacaaaaaggaagtccacttacagacccctatctgaaggtcaccaacatcaaagaccaaaggtagataaatacacaaagatggggagaaaccggcataaaaagtctgaaattcaaaaaaccagaacgcctcttgtcttccaaaggatcacaactccttgccagcaaggcaacaaagctggacaatgagttttacaaattgacagaagtaggcttcaaaaggtgggtaaaaacaaactcctctgagctaaaggggtatgttataacccaatacaaagaagctaagaatgttgaaaacacgttaggtgaattgctaaatagaataaccagtttagagaagaacataaatgacctgatggagatgaaaaacacagaatgagaacttcgtgaagcaaacacaagtatcaatagccaaatcaatcaaggagaagaaaggatatcagagattgaagatgaacttaatgaaataaagtgagaagacaaaattagagaaaaaagaatgaaaaggaacaaacaaagcctccaagaaatatgggactatgtgaaaagaccaaatttacgtttgattggaatacctgaaagtgatgggaagaatggaaccaagttggaaaactcttcaggatattatccaggagaacttccacaacctagaaagacaggccaacattcaaattaaggaaatacagagaacaccacaaacatactcctcgagaagagcaaccccaagacacataatcatgagattcaccaaggtcaaaatgaaggaaaaaatgttaagggcagccagagagaaaggtcgggttacccacaaagggaagcccatcagacaaacagtggatctctctgcagaaaccctacaagccagaagagagtggggccaatattcaacattcttttttttttttttcatcatttcagctttattttatattacatcaaaattatgtttttgaaactttatggagaccataaaacattcgctttcaaaaaattacccttgttgcctatagtggcttctccataggcatattctacatgtgttttatgattttttttaattttattattattattttttattatgctttaagttttagggtacatgtgcacaacgtgcaggtttgttacatatgtatacatgtgccacgttggtgtgctgcacccattaactcatcatttagcattaggtatatctcctaatgctatccctcccccctccccccaccccacaacagtccccagtgtgtgatgttccccttcctgtgtccatgtgttctcattgttcaattcccacctatgagtgagaacatgcagtgtttggttttttgtccttgcgatagtttgctgagaatgatggtttccagcttcatccatgtccctacaaaggacatgaactcatcattttttatggctttttaatgatcaccattctaactggtgtgagatggtatctcattgtggttttgatttgcatttctctgatggccagtgatgatgagcactttttcatgtgtcttttggctgcataaatgtcttcttttgagaagtgtctgttcatatcctttgcccactttttgatggagttttttgtttttttcttgtaaatttgttggagttcattgtagattctggatattagccctttgtcagatgagtagattgcaaaaattttctcccattctgtaggttgccggttcactctgatggtagtttcttttgctgtacagaagctctttagtttaattagaatcccatttgtcaattttagcttttgttgccattgcttttggtgttttagacatgaagtcctggcccatgcctatggcctgaatggtattgcctaggttttcttctagggtttttacggttttaggtctaacatttaagtctttaatccatcttgaattaatttttgtataaggtgtaaggaagggatccagtttcagctttctacatagctttctacagctagccagttttcccagccccatttattaaacagggaatcctttccccatttcttgtttttgtcaggtttgtcaaagatcagatagttgtagatatgtggcattatttctgagggctctgttctgttccattggtctatatctctgttttggtgccagtactgtgctgttttggttactgtaaccttgtagtatagtttgaagtcaggtagcctgatgcctccagttttgttcttttggcttaggattgacttggcaatgcaggctcttttttggttccatatgaactttaaagtagttttttccaattctgtgaagaaaatcattggtagcttgatggggatggcattgaatctataaattaccttgggcagtatggccattttcatgatactgattcttcctacccatgagcatggaatgttcttccatttgtttgtatcctcttttatttcattgagcagtgatttgtagttctccttgcagaggtccttcacatcccttgtaagttggattcctaggtattttattctctttgaagcaattgtgaatgggagttcactcatgatttggctctctgtttgtctgttattggtgtataagtatgcttgtgttttttgtacattgattttgtatcctgagactttgctgaagtagcttatcagcttaaggagatcttgggctgagatgatggggttttctaaatatacaatcatgtcatctgcaaacagggacaatttgactttctcttttcctaattgaataccctttatttccttctcctgcctgattgccctggccagaacttccaacactatgttgaataggagtggtgagagagggcatccctgtcttgtgccagttttcaaagggaatgcttccagtgtttgcccattcagtatgatattggctgtgggtttgtcatagatagcttttattattttgagatccgtcccatcaatacctaatttgttgagagtttttagcgtgaagtgttgttgaattttgtcgaaggccttttctgcatctattgagttaatcatgtggtttttgtctttggttctgtttatatgctggattatgtttattgatttgtgtatgttgaaccagccttgcatccctgggatgaagcccacttgatcatggtggataagctttttgatgtgctgctgggtttggtttgttagtattttattgaggatttttgcatcgatgttcatcagggatattggtctaaaattctctttttttggtgtgtctctgccagggtttgctatcaggatgatgctggcctcataaaatgagttagggaggattccctctttttctattgattggaatagtttcagaaggaatggtaccaggtccaccttgtacctctggtagaattcggctgtgaatccatctggtcctggaccctttttgttggtaagctattaattattgcctcaatttcagaacctgtttttggtctattcagagattcaacttcttcttggtttagtcttgggagggtgtacatgtcgaggaatttattcatttcttctagattttctagtttattcgcatagaggtgtttatagtattctctgatggtagtttgtatttctgtgggattggtgttgatatcccctttatcattttttattgcatctatttgattcttctctcttttcttctttattaatcttgctagtggtctatcaattttgttgatcttttcaaaaaaacagcttctggattcattgactttttgaagggttttttgtgtctctatctccttcagttttgctctgatcttagttatttcttgccttctgctagcttttgaatgtgtttgctcttgcttctctggttcttttaattttgatgttagggtgtcaattttagatctttcctgctttctcttatgggcatttagtgctataaatttccctctacacactgcttaaatgtgtcccagagattctggtatgttgtgtttttgttctcgttggtttcaaagaacatctttatttctgccttcatttcgttatataccctgtagtcattcaggagcaggttgttcagtttccatgtagttgagtggttttgagtgagtttcttaatcctgagttctagtttgattgcactgtggtctgagagacagtttgttataatttctgttcttttacatttactgaggagtgctttacttgaaactatgtggtcaattttggaataggtgtggtgtggtgctgagaagaatgtctcctgttgatttggggtggagagttctgtagatgtctattaggtccacttggtgcagagctgagttcaattcctggatatccttgttaactttctgtctcgttgatctgtctaatgttgacagtggggtgttaaagtctcccattattatggtgtgggagtctaagtctctttgtaggtctcaaggacttgctttatgaatctgggtgctcctgtattggctgcatatatttttaggatagttagctcttcctgtggaattgatccctttaccattatgtaatggccttctttgtttcttttgatctttgttggtttaaagtctgttttatcagagtctaggattgcaatccctgcattttcttgttttccatttgcttggtagatcttcctccatctctttattttgagcctatgtgtgtctctgcacgtgagatgggtttcctgagtacagcacactgatgggtcttgactctttatccaatttgctagtctgtgtcttttaattggagcatttagcacatttacatttaaggttaatattgttatgtgtgaatttgatcctgtcattatgatgttagctggttattttgctcgttagttgatgtagcttcttcctagccttgatgatctggcaacagagccagaccctgtctcaaaaaaaaaaaaagtaaaacagtaataaataaatagatacatatacagaagatacaaggagacaacttgcacgaggaaaagccacatggttcacaaacatatgggaaatgtttaaacctactggtattcacaaaagtgaaagcaaataacttaaaaaacctatcaaggaagagggccaaataggaacagctctggtctacagctcccagcgagattgatgcagaaggtgggtgatttctgcatttccaactgaggtacctggttcatctcactgggactggttggacagtgggtacagcccatggagagtgagccaaagctggatgaggcatcgcctcacctgggaagtgcaaggggtcatgggagatttccctttcctagccaagggaagctatgacagactgtacctggagaaatggtacactcctgaccaaatactgctcttttcccacagtcttagcaaccggcagaccaggagataccctcccatgcctggctcagtgggtcccatgaccacagagccttgcttactgctagcacagcagtctgagattgacctgcgatgctgcggcttgatgggcggatgggcgtctgcccttgctgaggcttgagtagctcacagtgtaaaccaagctgccgggaagcatgaactgggcagagcccaccacagctcagcaaggcctactacctctacagattctacctctaggggcggggcatagtagaacaaaaggcagcagacagcttctgcagacttaaacgtccctgtctgacagctctgaagagagcagtggttctctcagcatggcattcgtgctccaagaatggacagatggcctcttcaagcaggcccctgacctccgtgtagcctgactgggaaacccctcactgtaggggctgagagagtcctcaaacaggctaatacccctctgggacgaagcttccagaggaaggatcaggcagcaatatttgttgttctgcagcctctgctggtaatacccaggaaaacaggatctggagtggacctccagcaaactccaaaagacctgaagctgaagggtctgactgttagaaggaaaactaacaaacagaaaggaatagcatcaacgtcaacaaaaaggacatccacaccaaaaccccatctgtaggtcaccaacatcaaagaccaaaggtagataaaaccacaaagatggggagaaaccagagcagaaaagctgaaaattctaaaaaacagagcacctcttctcctccaaaggattgtagctcctcgccagcaagggagcaaaactggacagagaatgagtttgacgagatgacagaagcaggcttcagaagatctgtaataacaaacttctttgagtgaaaggaccatgtcctagtccatcacaaggaagctaaaaaccttgaaaaaaggtttgacgaatggctaactagaatacacagtgtagagaggaccttaaatgacctgacggagctcaaaaccatggcacaagaacttcatgatgcacgcacaagcttcaatagccaattcaatcaagtggaagaaaggatatcagtgattgaagatcacattaatgaaataaagcaagaagataaggttagagaaaaaagagtgaaaagaaatgaaaaaaggcttcaaaaaatatggactctgtgaaaagaccaaatatatgtttgactggggtaccggaaagtgacagggagaatggaaccaagttagaaaacactcttcagggtattatccggcagaacttccccaacctagcaaggcaggccaacattcaaagtcaagaaatacagagaacaccacaaagatactcctcgagaagagcaacgccaagacacataattgtcagattcaccaaggttgaaatgaaggaaaaagtgttaagggcagccagagagaaagtccgggttacccaaaaagggaagcccatcaaactaacagtggatctctctgcagaaaccctacaagccagaagagagtgggggccaatattcagcattcttaaagaaaagaatattttcaacccagaatctcatatccagccaacctaatcttcataagtgaaggagaaataaaatcctttacagacaagcaaattctgagagattttattaccaccaggcctgccttacaagagctcctgaaggaagcaataaacatggaaaggaacaagcagtacaagccactgcagaaacatactaaatggtacagatcatcgacactatgaagaaactccatcaattaacgggcaaaataaccagctaacatcataatgacaggatcaaattcaaacataacaataataaccttaaatgtaaatgggctaaatgccccagttaacagacacagactggcaaattggatagagtcaagtccaatcagtgtgctgtattcaggagacccatctcacatgcaaagatgcacataggctcaaaataaaggaatggaggaagatctaccaagaaaatggaaggcaaaaaaaagcaggggttgcaatcctagtctctgataaaacagacttaaaccaacaaagatcaaaagagacaaaggaggccattacataacggtaaagggatccatgcaacaagaagagctaactatcctaaatatatatgcacccaacacaggagcacccagattcataaaacaaattcttagagtctaccaagagacgtagactcccacacaataatagtgggagactttaacacctcaccgtcaatattagacagatcaatgagacagaaagttaacaaagatatccaggacttgatctcagctctggaccaagcggacctcatagacatctacagaactctacaccccaaatcaacagaatagacattcctctcagcaccacatcacacttattctaaaattgaccacataattggtagtaaaacactcctcagcaaatgtaaaagaacagaaattataacaaactgtctctcagaccacaacgcaatcaaactagaactcaggattaagaaactcactcaaaactgctcaactacaaggaaactgaacaacctgctcctgagtgactactgggtatataacgaaatgaaggcagaaataaagatgttctttgaaaccaacgagaacaaagacacaacataccagaatctctgggacacatttaaagcagtgtgtagagggaaatttatagcactaaatgcccataagagaaaacaggaaagatctaaaattgacaccctaacatcacaactaaaagaactagagaagcaagagaaaacacattcaaaagctagcagaaggcaagaaataactaagatcagagcaaaactgaaggagatagagacacaaaaaacccttcaaaaagtcaatgaatccaggagctggttttttgaaaagaacaacaaaattgatagactgttagcaagactaataaagaagaagagagagagaaatcaaacagacccaataaaaatgataaaggggatgtcaccactgatcccacagaaatacaaactaccatcagagaatactacaaacacctctacgcaaataaattagaaaatctagaagaaatggataaattcctggacacatacaccctcccaagactaaaccaagaagaagttgaatctccgaatagaccaataagaggttctgaaattgaggtaataattaatagcctacaaaccaaaaaaagtccaggaccagatggattcatatccaaattctaccagaggtacaaggtggagctggtaccattccttctgaaactatttcaatcaatagaaaaagagggaatcctccccagctcattttatgaggccagcatcaacctgacaccaaagcctggtagagacataacaaaaaagagaattttaggccaatatccctgatgaacattgtgcaaagatcctcaaaaaaatactggcaaaccaaatccagcagcacatcgaaaagcgtatccaccacgaccaaatcagcttcatcccagggatgcaaggctggttcaacatacataaatcaataaatgcaatccatcagataaacagaaccaaagacaaaaaccacatgattatctcaatagatgcagaaagggccttcaacaaaattcaacagcccttcatgctaaaaactctcaataactaggtattgatggaatgtacctcaaaataataagagctatttatgacaaacccacagccagtatcacactgaatgggcaaaaactggaagcgtacactttgaaaaccagcagaagacaaggatgccctctattaccactcctattcaacgtagaacactacgttggaagttctggctagggcaatcaggcaagagaaagaaataaaggatattcaaacaggaaaagaggaagtcaaattgtctctgtttgcagatgacatgattgtatatttagaaaaccccatcgtctcagcccaaaatctccttaagctgataagctacttcagcaaagtctcaggatacaaaatcaatgttcaaaaatcacaagcactcctatacaccaataatagacaaacagagagtcaaatcatgagtgaaccgccattcacaattactacaaagagaataaaatacctaggaatccaacttatgagggatgtgaaggacctcttcaaggagaactacaaaccactgctcaaggaaataaaggaggactcaaacaaatggaaaaacattccatgctcatggataggaaggatcaatatcgtgaaaattgctatactgcccaaagtaatttatagattcagtgctatccccatcaggctactactgacttttttcacagaattggaaaaagctactttaaatttcatatggaaccaaataagggccctcatagccaagacaatcctaagcaaaaagaacaaaactggaggcatcatgctacctgacttcaaactatattacaagcctacagtaactaaaacagcatggtactggtaccaaaacagatatatagagcaatggaacacaacagaggcctcagaaataacactatacatctacaaccatctgatcttagacaaacctgagaaaaccaagcaatggggaaagaattccttatttaataaatggcactgggaaaactggctagccacatgtagaaagctgaaactgaatcccttccttacaccagatataaaaattaactcaagatggattaaagacttaaatgtaagacctaacaccaaaaaagccctacaagaaaacctaggcaataccattcaggacatagcatgttgtacgtgttgacataggacaagacttcatgactaaaacaccaaaagcaatggcaacaaaagccaaaattgacaaatgggatctaattaaactaaagagcttctgcacagcaaaagaagctatcatcagagtgaataggcaacctacagaataggagaaaaactttgcaatctatccatctgacaaagggctaatatccagaatctacaaggaacttaaagaagtttacaagaagaaaacaaacaaccccatcaaaaagtgggcaaaggatatgaacagacacttctcaaaagaagacgtttatgcagccaacagacgcatgaaaaaatgcacatcatcactggccatcacagcaatgcaaatcaaaaccataatgagataccatctcacgccagttagaatggtgatcattaaaaagtcaggaaacatcagatgctggagaggatgtggaggaataggtacgtttttacactattggtgggagtgtaaattagttcaaccattgtggaagacagtgtggcgattcctcaaggatctaaaactagaaatagcatttgacccagcgatcccattactgggtatatacccaaaggattataaatcatgctgctataaagacacatgcacacgtatgtttattgcggcactgttcacaatggcaaagatttggaaccaacctaaatgcccatcaatgatagactggattaagaaaatgtggcacatatacaccatggaatactatggagccataaaaaaggatgagttcatgtcctttgcaaggacatggatgaagctggaaaccatcattctcagcaaactatcacaaggacagaaaaccaaacaccgcgtgttctcactcataggtgggagttgaacaacgagaatacgtgaacacagggcagggaacatcagacactggggcctgttgtggggtgggggtctgggggagggatagcattaggagaaatacctaatgtaaatgacgagttgatgggtgcagcaaaccaacatggcacatatatacctatgtaacaaacctgcacgttgtgcacatgtaccctagaacctaaagtataattaaaaaaaggatcaaaagcttttttaaaaaaagaaagaaatacttgtatttgtatgcagtgttaaaaaaaaacaaaaaaaaatttaggaaattatagaaatagcaaatcgaaagggagataatttggaaaaaatgcagtgaaacatactgctctggtgggagagtaaacttgtaagccattttaaaaagtaatttaaaaacatgacaataatctaaaaaatattcattttcttcattgtaatgattttctctagagaatctgtcttcaggaaaactctaaatgcatataataattatttacaaaggtatttggaaagttatgtacactaccccaaaatggaaaaccaaaatgtctcatctttaagggaaaggcttaatgacacaaatggaatattatgcaccaaataaatggtgtttacaaagataatctacaatgattattgaatagtaatgattattgaatagtaataattaaaaagaatcaagatatcgttgccacttaataaaaatctgaatagtgcaaatgttgggaaaaaacgcactgagatattgataatgcatatctttgcttgataaggtaagtagtgattttctctttcatcctatttttatcagttttccaaaatatgccttagttgattaaaagtctttccaatccaccattttctgtaaattttctaaaattactcttagctctgaagttcaatgaccctggttcagtcacctatacctcacaatgagaaagcagcaataacctcctgattggttttgcagccactattggattccttttcttatattaatagttcatatttattcagttcttactgtgtctgatgcattatataaagcattttatatacattagccaatgcattgtagtgatatcccccattttacagataaggaaattcatacttagagacattaagtagcttgctcaagctcactcagagattaaatggaggagtttcaaagccaggtttgtttgaggctggaatacaaactcttaactattctttcatgatgtctatcaacatacttctccaaattattcttgtagataagcagcctaattaatagaatgttaacagaatagaatgtccagtatatggacttccattttcataatattacctcctcaaaagcctcaaaagttccttgtttgctaacaaataacctacaaatgaatcctggcattcaaaaccttttgttttctagacctgaattctccttccaacttgattttctgctacattctagcccattctctctttcttctatctgtccatccgtctgttcagctgtcattgatctctccatggaatggcataaatgcatctaaggaagtgactacaatacatccatcctggcgttaaaaagtagaaaagaaaggatttctgatatatataatcagagagctgctgtattttaaaaataattttaaacaccctctcagagggtattctaggggtaaaaaacccttcactcgtttgaattctcgctgaatttaaagtgaatgtctacttatcatagcccaacaagataaagaaaaaaggccttttgaagtcaaagcaatactttttttttacctgtgggaaggcctattccctagatctgggaaagtttcctagaattcagccatacattttctgtgttttacattatctagagcacatgacatctgcaactgtggcaggaatgacagagtagttcaactgggcaatgaaatggagaacttggaaaacttgatcatttgacctgtatccagaattaatattgtcaattccatgttatgtactgagactcaattagcattcttctggacttgttacttacaagtgtggtctgagagccagctgtatcagcatcaccagtaaacttgttaaaatgtggaatatccagccccacctcagacctaatgaaacagaattcacagcttaacaaaatccccaggtgatttgcatacataattaagttttagaagccctgacctgggagcacgttccattattataacaactttctgaacacaagagggcagtatttcctaccccctcagagcctgtctcagatgtgaaacgaagttcactgcatagctggattaggccagtatgtgtaaggggctgaacaggcttgccattgattggctggataggaaggccagaacttccttctaggggtagaagaaccccagtaacacctatcaaactaaacagaatggctttttggctgagaaggctgggtctacatttcaggccacatttggggagacgaatggagtcattcctgggaggtgttttgctgattttgtggcttcaagtggactgtgagttggagatttcctgttgatggagacagagagatccagggctgcagtgcacaggatgaaggggaggggctaggatccattcttccccatctttggttatatctggggttgtgggaggaaaatagactcaacagtgtcagtgtagtgactaaccctcctacttttggtgttgtgtttctgcctaggggtgaagagccaaaagatagaacagaattccgaggccctgaacattcaggagggtaaaacggccaccctgacctgcaactatacaaactattccccagcatacttacagtggtaccgacaagatccaggaagaggccctgttttcttgctactcatacgtgaaaatgagaaagaaaaaaggaaagaaagactgaaggtcacctttgataccacccttaaacagagtttgtttcatatcacagcctcccagcctgcagactcagctacctacctctgtgctctagacacacagtagtgccctggcagctgcttcctgcacccaaactctgctaactctcacaatcagagctcatggctgtgctgtctcccaaaggctaatcacagctcctgacagaatgggggggtgttagttgaaagggcaattttcaaaacaaacaaacaaatgctctgaagaattcctcagagaaaggagggaggacttgcttttaaaaaatgcataaattctgcttagtttttgtgactagcctagagcagcgtgataaatttatggagttaaacacattacacttaagcattaaaacatggattcttctagatgaaaaaataatccaaacatttttgagtcccttcccaaactgaacactgaataatgatgatgatgatgataatgataaaaaattgacctttttaaaaattgttcatcttatgaatggataaccatgctatattggaaaacatgccataagtcatggcattgcagagataaatttagagcccttgtttactatgtatgtggtatcagtgagtaggtcaatatacaagtcttctttttcatttgtttcttaagagacagggtcacactctgtcacccaggctggaggctggagtgcaatagcacaatcacagctcactgcagaccacaactcctgggcttaagtgatcctcctgcctcagcctcctgagtagctggaattacaagcacacaccaccatgcctgggttgtacaactcttttaagaaagagaacttacaccttctcatgttaggcatgggttctgagttgaggacttctccgttattattgcctgaattgccatttctatcaatttctgtcatctatgtattaccttatttcttgatctatttttagattattgccaaaacagacagatcccataggtcatgcatgttcagttactaacatggcagaatctgtgggttttgactaactctgttttaggctagggctgatatttctgtctgctttgggccacatacagtcactgccaaaatgatatgatcatgaagctgtttgtgtttgagtgtaggaagaggtgcagagagaatatatgtaggataataggggaagaaaacaatacacctagaaaaacagaatttgaggacaagaagtcccttcttttaatcaccattaataaaatagaggcagctaggaataagaaaataatgggctctgagtcactggcatctgggatttgatagtcagagagaaggagagttcaatgcagagattgttaaccatagttggacatcttgaaggttcataaactccctgaaattgagaatagatggaatattattatgacataattattgtttgggaggagttttcctcccatttctggcaatgaacaagaaaagattcatataatttgaatatggataagagttatgtcagaacagggggctgagagaaggatgagggattgttcaacagctcaggccagagatgaggacagacctaagaaatgattgaatgtaggagaatttagaagggagtaaataattttctccaacaggaattggaatgtctttccctttgtaataaatggagggtataaattacaactggcagtacagcattcaaaagtatgggcgtgggagtgcaacatatcggtggaaaattctgacccagtcaatgactgggctgtgttgtcttggggaagtgtttctagatctctgagtaccaaattcctctcctgtgaaatgctagtaatagaattacctcataggattattgttaagaatacataaaagtataaaaatatatataaggcaactattgtggtggcaggtacaccagtgcactagaaattcaacagacacttgtttatagttcatttctttcaggaagttaaaactcaaattttctgctctaagcattaaatatatctttttcatgttctatttctgtagtctttttactaatcacctcaaaatctatttgaaatgatttggtatgtaaatatataaatgatctgtatttcacaaaccagagacattaacaaatattattgagtacctgctatgtgccagacactgctatatacagcagggatgcatcaatgaataaaatagacagaagttttggctctcctggagcttatattttattgaaaaaacagagtgaacaaaaaatgtgataagtaatatagtatgttagaagacagtaagtactatgggaaaagtagaccagggtaatggggatgggaaatgtggaggtggagctgtctgcagttggaattttaaatgtggggagggagtcatggtagttcttattgaataagtatgtgaagaaagtgggggaggaagtaatacagttatctaggagagcatgaaccaccttggcaaaattgtgacggtaagagaaatctgacatagctgactccattttgcttctaacctccaagctgtcctgttcattcctgggtgtaggccaagctgactttgggagaaatttagtttatagtttaaccttaaagcaaagatgataatagtccttccccaaacaaccccttccttggttgggggaccaaaactgcctttgtaaaactaacaaattagccgtaagattagaaattatgactcaggagttatgcaggcagaggtcacaacattagtaacctccccacttgctcctatggatatcaactctatcataggacctaagattggtgttcaaggtatttttcagattctaaatcctgctggaccagctggtgccacctggactggtaaactggctcaactggttttgtgatcccatccaggaactgactcagcacaagaagatatcttcaactccctgtgatgtcatccccaacccaaccaaccagcatttgtcaatcactagccccctgcccaccaaattatccataaaaacccaaatttttgggtctccaaatttttgagtgctgtgggtgggggtctggattcttgattttgggctttgagtctattcctgatgacttttggcttggtaaaaagtcttgatttagagccagctcttttacatggtttaataaaataatccacgcattattattaatgcaaagattaattattaattaataatacatattattaatgcatagattattattagtgtacttctctgtatggaaaagaagtctgatctctttagggtactgttttaactcaaccgtgggtccttcttactggaaagatttctttctttggtacaccataatttattcattgttttcataagcatcattgcagaggaaacagagatttttgttttttaggaaagctgatccaaaatttagagattatgagtttattggaggtctatgattaaaataggattaccatacaaaatattttttaaggcaaaacaatctttcattttatttgtttgcacaggtgacaccattatccacatggaaccacaaggatttatgaaaattctggcatgtcttgccagttgttccaactgaaaactatcctatgcgtggaaatttgcttctacctcagagtctaaaatttaagctaagaatcttgagtatgctgtggtaaaatagaaagaataactacatttaagtaaatatcgagcaactatttgctttccttattttcctcccaactcttctggttttaataagattttctagttatttaaattgaactatttagttgatttaagttgaaccaacccaagaaacaggaaactagttaagtcaccacttgagcaaaagagaaagacgagaattaagttaggttgacaagtgtgagaagaaaaaagagaaaaagttttgttgatctttttaacctcttaaatatctcatatttgtctattttccaccgtcaccaccacctggaggaatgcagtagcctcctaattgttatgtctgtatttactttagcttttgcatttctgatctatttaatacattagcctgccaagatattttaaaaaatgtgaatttaatcctatcatctccctgcttaaaatactcttaagccttcctgttgtgtttatcaaaggccgaaatccttaccaaaacccctccatggtttgctccctacttcttctctagttaatttttactgcaatgcccttttcattcttttatgctcccatcccataggtcagtttttatttccttgaaagtgccagatatcccttaccttggagtcttccaagataccattttccctgcctggaattttccctcattctttccgtgagatcccaattcaattgtcttttggaaaaaccttctttgacacttcacccagttttcaaatagataaaatttctttatgtaagttctcaaaacaccttcctattagctattattagatgagtttgtgttccatgaaagcaggaactatgtttatcgttttcttagcattttattactagaaaactatgacctatggctcatctagacaatggagtcactgtgtctaaaactaatactaagataaagatggtggaaggtcatgaatgttctttttctaaataaagacctgtttttgatctccacccttggacttttccagttttgttttcatagctcttcatattgccaggctgtactactttttgaggagacggtttccatgttgaattagctcccctgtgaaatgggtttctttccctttattctaacctggtcttcctaaagttctatagggaggctgtgtctaaccatcatgaaatttgatgagcctgtactctgatgattttacaggtccatcctgtgcttctcatgattttacaggttcctgtcccagctggtctatctttttattacagatgtgagtgtcttgatgtagaaatctctcttctctgctgtatgcttcctacccagcaacttttatttttattaactggaatgtgtctcactatgttgctgttttctaaatctgttaggagataagacattctgcttcagttggatgttgtttatcatgtattgtattacaataaaaacgtatgaaactttattatagtatataatgttattctggactacatgaatctatcaataaataattgttaggcatattctgtgctccaggcatcttactacatgctgttaaaatacagctcctgccttgaagcccttactggtcacacatcagaaactcttcttgttcctaaaatgacaaatcaaacaaacaagaataaaacaaacctcttttttgtatttctgtcttcacattgctatgtatttgtttcaaagaatgaaaattggtttctatctgaaactagtaattattaacatttgtttagtactgactacatgtaaagtatggggttaaaatttttacaaaacattgttaattaactttcatagcaatatctgagaagatttctttatcatgatgatgaaactattactggcactatataaaatattcataataagagccactgacttagccagcacaaaagttagatttgaaccgtgtctaccagatgcccaacgccaatatttaagcactatttactgctactagcctagagatctctgttttctgatgatgcagcttggacatgtatcattcctgtattcatttgaggaaaagaaacaaagtggaagctcaatagtaagtaagccaattattcgcagctgcctgtacctcagcacacagaagccagtcaatcagtgaaagtgttctttgatattgagttatataattactgaagagtcctgcttaaacagatgttgctgtgtaggcgctccagccatagcctggattttagtagatcctggagatacctgcaacaatagatcatggagacacctgttatgtacttaataagcatattttccaaattagaaaatggaacatatgatgtgataattgtaagtaaacacaatagacatatgcaggacactatatacagataggtatttcccagcatgtatttgtatttttaacaaacaatgttttgttgctgctgcttggcatcaatataggcaactgggcagatgttggcagtgagggggagaagggtaagtttaccagattcttcttagttggttattagaaatgaatgcactagttagtgtaaacaactttgctttcttatcatgagctgaaaaattttcactttaggaactgactagagaatgtacaacattcagaagcctgaaggtacgtaactattagttctcaggcagtcttcaaagcccatcataaatagcatttgtcatcaaatcctcccatacattataatgtgctgtagctgaatacagttactggttgaattattgatcttgctaaaaattaaactttacctatttgtatttccaagtgtcattgttactcaaataaggaagagttagtaaaaaaaagttttgacaaatggcactcaaacaatttggtatgcttacatatagaaaaataaaccattatccttatcttacattgtacaccaaaataaagtcaaaatgggtcatagatctaaaggtaaaggaaaagctgtagacctagaagaaaacattggagaagttattcacaacttttgggtaataaaaatttcataggtatgacaccaaaatcataaaccacaatgaggaaaaaatcatgtcttggacttcatcaaaattaaaaacttctgctctttcattaataaaatgaaaagacaagctttagactgggagaaatattctcatgctcttgatgcccatatctgacaaaggacttgttttcagatatctaaagaagccctacaccttaataataaaaagaaaaaaagatataagtagtcaaaagatctgaataaacagttcacaaaagaagatatgtaaatggcaaatgagtacatgaaaagatgctcacatcactggttatcagatgaatgcaaatcaaaagcatgagatacactacatactcacccaaatggtgaaaattaaaaaaacctataattctaagtattggctgggatgtggggtaacgaactctcatacttctctgtgatggttgggggacacagcagtgtatttctctgcacttattgaagccactgagagagaaatgatgaagatgggtcgaggagaggcatgtctaaccccaggactctgcttgaaatgcccagctgcttctggagccaacaggaaaatcactacacagacaagaagtggctaggggtgtggcaacacagatgtggaggttacagagaaaacattcattgtaagaaaaacacctcctgtctgagcccaaagagcgcatctaccagatgtatcatttaccagaaacatctttacctgtgaatcttgacttgaaggtgagtttaaaatcactatcaattaacaattaaggttaacaattacaacaattggctgtgtcttaattaaactaaactggctaatgaattggctaatgagactcagaaatacgtgtctgaaaataagtaaaatagctgtgaattgttggatgttcaaattcactcattcaacaaatattttgagtgtctaccatgttccagaaattgttctaaatattaatgcatctctttgtttcttaaaaataaatactgtttcacaaataatttggttataggccagtgtgttaagtcacagggctttcccccatggagacctaaatgtctgcatttgtgtcagaacaatactttccaaatgatctagttccctggagtgtgcagattacttgtgttaatggcttgtgatggtgaccccatctatcagaggtgtttgaaccagagcaactccatcttgaatgggggctgggtaaaatgaggctgagacttactgggctgcattctcagacagttaggcattctaagtcacaggaggtcagcacaagatacaggtcataaagaccttgctgataaaacagtttgaaataaagaagctggccaaaacccaccaaaaccaagatagctaagagagtgacctctggtcatcctcactgctgtgctcccaccgaaccatgacaggttagaaatgccatgacaacatcaggaagttaccctatacggtctaaaaaggggaggcatgaataatccactccttgtttagcatatactcaagaaataaccataaaaatgggccaccagcagtcctcagggctgctctgtctatggagtagccgttcttttatttctttactttcttgataaacttgctttcactttattctatggactcaccctgaattctttcttgtgcaagatccaagaaccctctcttaggggtctggatcgggacccctttctggtagcacatctgcactaaaatccgagtgtgcatcaggttagaatgaggattggaatatgtgggctatgttgtatgcagagtttaaattttactaaagactctcaaactgtgttttttttttttttttttttttttttttttttgcgactgagtctcgctgtgtcgcccaggctggagtgcatgtgcagtggggtgatctcggctcactgcaaactccgcctcccaggttcacgccattctccagcctcaggctccctagtagctgggactacaggggccacaacgcccggctattttattttttattttttagtagagatggggtttcaccgtgttagccaggatggtctcgatttcctgacctcgtgatccacccacctcggcctcccaaagtgctgggatttcaggcgtgacccaccgcccctggcctccaaactggtttttgaagtgttataactttgtgatttgactctcgagagtggtttctgagagtccctgtttcaccacttccttgacagccttggtattgtcaaacttaaattttgttcgtcaacctgataagtgtaaatgctttaatttgcatttgattactagtgaagggtatcatctttttatatacttattagtcaaatgagttccttcttttctgaattcgctgctcttctatggagctttcactattctctacatgatttatgggcatttattataggttcttgaaaataatctagtgtaacctgtcttgataaatgtcttccatatatggcttgcttcttcgttttacctatggttattttgtatgcagatagttaaaattttaatgtagtcaaattactagtcttttcttttatagtttagtgtttagtatcaaagataacaatctttcttactatgaggccttaatacagtgttttccaatgttttcttctaattattttaaatttaatttttctcatttgggtatagtaatgttgtttttgaacaaagcttgaggaaaagttatattttatctctccccacaccaataaataatactaggtattcaacagtttaatctttctcccatattggttcttccgtctgtttcccagctaattatcttccactactgaaacaagatcttcctgagaactctacctaataatccatgaattaggagtttttccagtttgactgctgggaacaggcaggattcttgttcccaagggagcaccaagtgggcagtgctccttgtaatcctcttggatgtttttttccgctggcctcaggtagttgtctcccatgcatgtgctggccagtattctgctgggtactcaagggagaccctacgcagatctctgcagttttttctcggtgcatctcttttccattgggtgccctatgatgtgaattctatctgccttgatctcccagatctgaactctgtttcaactcacagaactgaaaaagaagttaacccgagccccttccccatttattatgaaagacaggaatttttcatagaaacatttcaaagcgaatgttaaattagcattttaaaagttatattttaggcaaatttccagataaacaaactggttaagacacaattttttcacttctaattttgcatcaaaattaggttctcttttcaaaaaaattattttattttattaatttttttgagacagactctcactctgtcacccaggctagagtgcagtggcaggatttttgctcactgcaacctccacctcctgggttctggtgattcttgtgcctcagcttcccaagtggctgggattacatgcatgtgccaccacgcccagctgatttttgtatttttagtagagatgggtttcatcatgttgcccaggctggtcttgaactcctggcctcaagtgatccgcctgccttgccctcccaaactgctggaattagaggtgtgagctactgcatctgaataaaagtagattctctagtcttcccaggacgtaatggatctgattggccctgtccaatcagtgctgctgatttccttccagtctgctcttagctttgtatttacgttctccattattttctggagaaagactatccaaaagccatatctaaagaactgccttttggggagatttgtaaaagctacagtgttgctaatctaaatcaaatgtaactattttataattacacataaagtagattaaatgaattataggcaaaaggaaaattatttgattcttagtggataaatggtatgcaaaaggatttatattcttagtacacggtactattcacagatctgtactgttactataaacacagctacacatgcttatctttctgctatttagaagaaattaaagaggaaagctggaagcatcaaatctgcatgatgtttttgggggatggagtagggaggttgtggctatcatgggtgcaaagttgagttggcaagagtcaaaggggacttctagttttaattttaattgatgttttttcaaagcatgccattgatgtcattcacataatattatttaaaatgatgtggataggctgggtgtggtgagcccatgcctgtaatcccagaattttgggaggccgaagtgggcagatcacttgaggccaggagttcaagaccagcctgggcaacatagtgaaactccgtcaaccctgtctctactaaaaatacaaaaattagccaggagtactggcacacgcctataattccaggttcttgggaggctgaggcacaacaattgcttaaaccctggaggtggagattgctgtgagctgagattgcacccctggactccagcctggtggagtgacacagtgagactctgtctccaaaaaaaaaaaaaaaaaaaaagatctggataaaatcaaatggattttgattttgtcaatagtggtatgatctgggttactctctataatataatttgttatagttaaaaaaaatttgtgcttgaaatcaagatacggttgaggctggggatatgaagccacttatcttttgattaattcgaagtttacagctctatgatacaatcatatgctgttgcctaaaaatataatactgacatcttaaatgtaagttttcctccaagatatttctttctcacactgcattcttgactgagtgactaaggtttgtcatcacattctcttacctctctctaaggattctgccatatttgctcccagcacccatgtatctgatcctgatggcagtggtggcctgtctggagcagctgttgcggggatgcccgctgcagtgggggaggtgcggccagggctttgcactctacagagctgaagggagccgggaacaggcaggaattccctgcctcctaccgagttggtagacggggagcgctgtgctcctgggtgcaactgcagctgcccagctgtggctccagacccaggaatccttgtgcttttgggggcctgggaagcctccctgcccccacaggctcagaagtgcctgctcccattccctggcctctcctcactcctggcacccactccgagtttggagcaaagttgtggccgagtctgggtgctgtcgcaacccggccggttgtacacgtgctcggagaagtactgtcacaccagccccttactgctgccttggccccctctggactttgggtactgttgaacatgggaaggaggcttggagtaggggccaagggaaggttggtgtgggcctacaggcacacctctgcgatggcctgaagcctgggggctgggctgccagttctgggtggagtccaccgcccagagtgggaacttaccgtgctttttctgggtccacacatggaccaatcagcacacacttttgaacccataaaaataggtttcgaacccataaaatgtcttttgaaaaatgtcttttgaacccataaaaaatgtcttttgaacccataaaaatcttgaactcggccagattcacacagatgtcgggactatcaactgcagaaaggagctacccactttgggtctccctgacttgtcaggacaacctgcctgtggaaaggagctacccatttcaggtctcctgagcgctgttctgtcactcaatgaagctcctctctgccttactcaccctccatttgtccacgtatctcattcttcctggacgtgggataagacctcgggacctgctgaatgatgggactgaaagaactgtaacgcaaacagggctgaacaccaccccaaccccaacatcgcaccccctatgctcaccacgttgtgggaaatgaggagagagctgtggccctttaaggagcccagacctgggagctccctgagccagggctgtgacacccagtttggggctctgcagttccaggcatctccaagcttctgggtgccactgcattccctggtgcccattgtggaagctgcttgtggtatgcctggtccagcttcagcctggcagggagccagggcctgtgctggcacctggagctgcccaccccaccacagccggcatacctggctttgcgcaatggccggacccttcactaactcacatacccctttccactccgtgcctggcttacccttggcagctgtggtatctgggccagtagcatgagctgaatgtagcctgctgggctgagtaggtggaacgagcccagtgggcccaagcaaaacttgggcaaagatgccactggacacagaggtttcgagctggaaaagtgacaccctaagtgtcctgtgacaatcctacagaaaagttgtattgctttctagagtacatttccaaatacgtattcctaacattcactttgatatggctacgggaggccttgcattgtgtgttattttctttttcttttttttttttttttaagatggagtttcgctctgtcatccaggatggagtgcagtggcacgatctcagcttactgcaaccttcgcctcccgggttcaagcaattctcctgcctcagcctcctgagtagctgggactacaggtgcatgctgccatacccagctaagtgttgtatttttagtagagacggggtttcgctatgttggcctggcttgtcttgaacttctgacctcatgatccacctgcctcggcctcccaaagtgctgggattacaggcatgagccaccacgtctggccactgtgtgttatttggaacctccgtgtacctatgttagctttccttggctttatcagttgagattgttgcattttgaagagaacatatatccagttcttctgttttgcccatctgctccataatcactggtgatagttttgctctgagatagatcaggcctcaatgaacagattaataaaagaaaaacacaggagaaagtcatgataatcacattatagaggcttataaaataagaacaattcctccaatttagaagttggaggaatttttgcacgtggtgttagcagatgtgcacagcgttaacatttctttaataattttgcttatagccacaaggtgacaggggttctctttcatttgtaaactatgtctttcttatacctaggaagtatgtttacgttagaagagcatattgctgattggttgacagacagacaggctgtttcatttattagattaaaagaaacaaacaataaaagctttgtttggctacataattttatgcagcatttttggtatcaagacaaagtatcaggatggagaagatgcggagacctgtcctaattatattttgtctatgtcttggctgtaagttgagggttctaagaactggggaccccaggagacatttattcaagtccttttggggagatggggatgtagtctggacttacttgtcattgcttgtttgagattaagaaataaaattatgaaaggtctaaattaaaatgtacatattgtacctgatgtctttctgaataggggcaaatggagaaaaccaggtggagcacagccctcattttctgggaccccagcagggagacgttgcctccatgagctgcacgtactctgtcagtcgttttaacaatttgcagtggtacaggcaaaatacagggatgggtcccaaacacctattatccatgtattcagctggatatgagaagcagaaaggaagactaaatgctacattactgaagaatggaagcagcttgtacattacagccgtgcagcctgaagattcagccacctatttctgtgctgtagatgcacagtactccctaggcacctgcaacctgtatccaaacatgcagctgggtagaagtaccataacagaagcatcagcaataggggccctgagcctgagtagacgtgaagaactaaggcatgagtatgaccagagaggggaggagataaagggtgctgttcatttgactcatgtatcttttatcaggccacccttcacaaagaccgtctttgtgccttatttgaattgatcaatcctgacccttcctatcttcagcagaatcctttagtgcccaggtcagtcttctagcatagagagcacttgttctcttctcaggcctggtggaaacacatgtcaaagaaatttgaagactgttgtttttctactgtaaaatctgacaaaggaactacaatggttggaatcatatgtgaaaaatgctgtagcagtggttttcatttactcacccactgaacaagtatctctcagctcctgatatgtgccaggtactctttagtcattgggatgcattggtattgaacatagcagataagccatcatagagctcatgtttcctaagtttctgggatacacaaaggggaaaccaagtctgcctaggatttagaggttcccgagaaattgcagcaagagtttagtttcatcttcatcaatcatttttctcatggaaacatggttaaagattggggacagctgaatgctgcttgaatctgtgggtcaagaattggcttcacatgttgaggtattgtctgccagagttgaggagaaatgccaggtggttttcggtatcatctggccatttccaaacaagtctggaaagtgaagtgctacaggctgtcataaataaaacaaatctataaagcctgaccctttatttaatggaattgtggagttcaaataaaatatcaaatacgatgctattgatgaatagcactaaacattggacattattttaaataatttgtagagtagctttctgttactgtagattctagatgctcttttggggacccagctcaggacaggctaagtggaatttgtgaaaccatcagaaaggagaaaggagaagctcagtccactgagccaatgctgtaggagttctttatatccagaatacataacgaatggctccaactttatagtgccaattaaaaatatgtaaaagacttgaacaggcattttacaaggaagataaaggaatagccaataaacacatggaaatttgttctatgtcttaagtcataaaagaaatgtaaattaaaaccacgatgaaatattactttatacctatgtctaaaattaaaaagactgacaacatcaaaccctaggtttccagtggccttgctgtcctgaacaggtgcaaacagcccagagctggggaagtctacaggccctgaatatccaggaggaatagccattgccataaattgaaatgaatatgattctgggatcttgttaaaagtatacattaacttagggtaaaatatatgaattaacttagataaaatgacggcagtattatggcaagtcttcctatccaaaagtgtggtaggtttttaattcttttgtgatctccaggagagttgcaatatatccagaatatagaaagaacgactacaactttatagtaacgataaaaaacatgcaaaagacttgaatacgcattttacaaggaagacaaaggaacagtcaataaacaaatggaagtttgttctatgtcttaagtcataaaagaaatgtggccacgcatggtggctcatgcctgtaatcccagcactttgggaggccaaggcgggcagatcatgtggtcaagagattgagaccatcctggccaacatggtgaaaccctgtctctactgaaaatacaaaaatcagttaggtgtggtggcgcacacctgtagtcccagctactcaggaggctaaggcaggagaatcacttgaacctgggaggcggaggttgcagtgagccgagattgcgccactgcactccagcctggtgatagagtgagactccatctcaaaaaaaaaaaaaaaagtaaattaaatgagatatcacttcatactcatggctaaaattaaaaagactgacaacaccaaattttggtgagaatgtagagtccctagaacatgccttactcatataggtttaaatggatacagccacattggaaaatactcaccctatgatccagcaagtatcttttgaggcatttacccaagggaaatgtaaaaaaaaaaaatccactttcctgtacaggaatatttatagaagctttattcataatagttccaagttggaaacaactcgaatgttcatcaataagaaaatggagcaccaaattgtaatttattcatactcagcagtaaaaaatagactactgacatataccacattgtaaacgaatttaaaaattttagttgattgaaataagacaaacatggagcaataaaaagtgtatggttctttaaatataaagttcaagaacatgtaaaactaatatatgtgaatagaaattttaaaaagtgcttgtctgtgcagggtggagatccagtagaaggtggtgtagcattttctggggggtaatgaaagtgttctattactctattggggtgttgatttcaagagtatatacatttgtcaaaacttcagtgtacatttgagatcagtgcatttccctgtgtgtaaactctacctcaataaaaattatttaactaaaaaaccttattttgcaaggatttaaaacaatcaataaattgtatccttacattagcaatgaataagtaaaaaattagcaatgagaggcacacactcattcaataactgttttggatagacagcaaagtcactgacagtggcttttctttttgattcctgggatccttcagagactccatctctttgatgctgcagaaaactggggtcactggtggcaggtttcttgtggtaggtagatttcccatgagcacctgttttgatctgtgtttccctgcccttccaatggttgagaagcttctgatgctgtatgttaaatgccaagagagaattcagtttccctgactttaccctatttaatctaaatccttggattacaattgttgggtgctagaaatcagatgttcctaataaagcccactgttacttgggaaaataagcaatttgtgtccttgatcatatgattctgacatatttcactcaaacctactggtataattcctaagatatattctctacataaactcatagagaagaacaggatttcccccacagaaagagacagtgtggacatcaaaggaaactatgttaactcaaaaaggtgaagccgttatgaaaatagagtctcttcaccttataggtgtgctgttcatataagctaaacagattacagacaaaggtccaaggaacaggggaagagggacacactggttctgaccttcatgaagataaggcacaaaggaggagggagaaggaaaagagtctcgatgcttcgacctaaacaaatccaggagagtggattctgaaggaaatatactactttcttgtctaaggataaaactttacatggcttttcagagcaatgatctctctctctctctcttcagcatttaccatttttttaaaattttattttattattattatactttaagttttagggtttgttatgtatgtatacatgtgccatgttggtgtgctgcacccattaactcgtcatttagcattaggtatatctcctaatgctatccctccctcctccccccactccacaacagtccctggagtgtgatgttccccttcctgtgtccatgtgttctcattgttcaattcccacctatgagtgagaacatgcagtgtttggttttttgcccttgcgatagtttgctgagaatgatggtttccagtttcatccatgtccctacaaaggatatgaacttatcattttttatggctgcatagtattccatttttttcataagcacaaaaggcaagaagaaggaactaaatagtgtttatttattttaccatgagctgagagtttagcagcttgggagcatttttccacaatgccagaaccttgtctttgaatctttgatgctcctctagctcactgttccaaaatggcattttaaaaaccattgctgatactgcctaaagcaatttacagattcaatgctactcctctcaatctaccaaagacattcctcagagaattagaaaaaacaattttaaaactcatacggtgctgggcatggtggcttatgcctgtaatcccagcactttgggaggctgaggctggcagatcacctgaggtcaggagttcgagaccagcctggccaacatggtgaaaccccattgctactaaaattacaaaaattagccaggtgtgccagtggggtcctgtaatcccagctactcgggaggctgaggcaggagaatcgcttgaacccaggaggcggaggttgcagtgagccgaggtcatgccattgcactcctgcctgggtgacaaagtgaaactccattaaaaaaaaaaaactcatatggaaccaaaaatagagcccaaatagccaaggcagtcctaagccccaaaataatgccacatatctacaatcatctgatctttgacaaaatcgacaaaaataagcaatggggaaagtactgcctgttcaataaatggtgttgggataactgattagccatatgaagaagattgaaactagaccccttccttatgccatgcacaaaaatcaactcaagatggattaaagacttaaatgcaaaatttaaaactataaaaactctgaaagataacctagaaaataccattctggacataggacctggcaaatatttcatcacaaagacaccaaaagcatttgcaacaaaaacaaaaaattgacaaaatggatctaattaaactaaagagcctcttcacagcaaaagaaactatcaacagaataaacagacaacttacaaaatggaataaaatttttgcaaactaggcatccaaccaatgtctaatatccagaacctataaggaacttaaacaaatttataagcaaaaaacaagaaaccccattgaaaggcgggcaaagggtacaaacagacacttctcaaaagaagacatacatacaagtggccaacaaggatatgaaaaaatgttcaacatcactaatcattagagaaatgcaaatcaaaatcacagtgagatgccatctcacaccagtcagaatggcaactatgaaaaagtaaaaaaatgacagatgctggtgaggttgtggagaaaagattatgccctgctggtgggaatgtatattggttcagccatcgtgaaaagtgatgtgatgattcctcaaagaacttaaaacagaattaccatttgagtcagcaattttgttattgggtatatgcccaaaggaatataaattgttctatcataaaaacacatgcatgaatatgttaattgcattactattcataatagcaaagacatggaatcaacctaaatgtccatcaatgatagactggataaagaaaatgtggtacatatccactatggaatactatgtagccataaaaaagaatgagatcgtgtcttttgcagcaatgtgggtggagctggaggccattatcctaagcaaactaaggcaggaacagaaaaaataaataccacatgctctcacttacaagttggagctaaacaacaagaaaacacagacaaataagaggtggacaacagacactaggaattacttgaggctggatggtgggagaagggagaggatcaaaaaactatcttttgggtactatgcctatgatatggtttggctgtgtccccaaccaaatctcatcttgattttagctcccataattcccactgtgtcatgggaggaacttggtgggaggtaattgactaatgaaaagtgtgggtttttcctgtgctattcttgtaacagtgatacgaacaggaggcagggaaatactgggtagaagaagatggttccctggtaaaggccccaccctctagactggaaatcgtggccctaaatgagaacagttatctctgttttttcaccgaaatgttgccttttgggcccaacctgcccccctatcctgtgccccatataaacctcagacgtcagctggtaaagggacaagcagctgaacattgagaggagaagaagcaactgagtgtcggagactatggatagacatggcttaacttcagacggcatgacttcagaggggagcctggccagagatggctgggcttcagggaaaaagatcaccttcttcccacacccatctcctttccagctccccttccactgagcgccacttccattgcttaataaaatcctccacattcatcacctttcaaaccattagagtgacctgattcttcctcgacgccggacgagaattcgagatgcactaggtgcaggaacccaaaaaggctgtcactctgactcttcactgagatgtttaacacttaagctgtccgaagatggcaaagctaaaagagcattaactgtaacaaacccctaaatgctgccgtggggccagagcccaaaagcactcacctcagccctggcacccacttgcctacgtgctcatttctgtgaggggttcagcacagcaggtttgagcaagcgaagttcatccctgcaggcgctgaagtggctggctggacccagagctggtgcactccagttcctgcccaccaaagggtcaagggaactatcccatctcagtagcgaataagtctcacgagatctgatggcttcataaaggagaattcccctgcacagactcttttgcctgccaccacgtaagatgggactttgctcctcctttgccttctgccatggttgtgagggctccctagtcacgtggtactgtgagttcattaaacctctttttctttataaatcactcagtcttgagtatgtctttattagcagcacgaaaacggactaatatagctcatcaccttggtgacgaaacaatctgcacaccaaattctgagacatgcagtttacctatatagcaaatctgcacatatacccctgaaactcaaataaaagttttaaaaagtcatgactacaacataaatcacctgagggaactttttaaaaacacagcttccccaggacagtctcatagaggttatgtcagtatgaataaggtggatcacagaatctgcatttttactatgctcccttgctgattgtgatgcaaagctaggttcaagaacccatgctgtaagatgcttctgaacatcagctaccatgtctccatgtggtagaagagtgtttgaacttgctttccagtctttggaagcaaatcaacatcacctatatgtttaatcccctatgtgaaaataatttatgtatgtacatgtttttatatgccatctatactaaatgctatctaccaatcatctatctatctaccaatcatctatctatctattatctatctatctatcatctatctatctatctatctatctatctatctatctatctatctatcacctatctatccatcctattggttctgtttctctggagaaccctgactaatacagacagtgtcctgggaataaaataagcctctgaataaatagcaacaggtgttcttcagatttgaaaatggtcacctggcagctgaatgtgacttgaaaatgaggtccaaggtaagcatgtggcactatctttcaggagaaaacgttccttgcagtgtagtcccttgcctgtgagggggcacagcttctgaaaacaaatacatctcctgctaaaatcttaggttcatgttcagcattttattgagatgacaatattttttatgctatgcagttaagaattgaggatgccagaggttttaaagatggaattttcaccaggtccagcgattacaacactcgtaatgtttggtaagtttggggaaaataatatgcctgttaaaatttggatttttaaaatttgttatgtcagtataataaccacaattttgtccaattcaaactcagggtgatatgcagctttttatttctgaggaggaagcagtggagactcagggacctggatagaaagttagtggccttctcagaaggagctctccctattgtaaactgttcctatgccaccatggtgaacctacccttttctggttatgttcaatatcctggtgaaagtctgcagctcctcttgagaactgcaaaggaaaatgagaatggaagcaacaaagactttgaagtcacatatcacgaagaaaaaaaaaacacctttcagtgggagaaactttgagcttaagtgtcagatgtggctgcttagtgctgtgctgtgagccagacacaccgagtggggctgcaggcgagctgagacaaggttcagtggcccaggcaggaccttgctgctgaggagctgctgcatgactcttgctggtttaaggaaaacctactgtggtttgaccttcagacactctagcagatgtaaagatcacctacatcgactctaaggacacagcagaagaacgggaagtgaatatggcctgagcataactctccttgtagaaagaagaaacagggtctgacatccttttccagagatcagtgaagtaagctctgtcttcttcttactaagttcagccctgtggctttgaccaagggcacctaaagaaatagtgatgtatagtatattgttttctctttagagatgcaacatgaaatatgtaaggttgcatctgcataatgtctccctggaagagggagggttatttcctagagcacataaggaagaaccccaacgcaactagttgttaaaaaaggagaaaatagaagggaagaaggaggaaaaagagagtaccacatgtaaacaaagaatggactgagagtgacatttgtcatagtttgttttgttacaaatcaaatagcagacatgaaatggtgccctcagaaaagtgaaaacaagcacataatttgtttgtggctcaagaagacatgaagaagtggctcacgtccaaatcctacacacattccttttccccttctctccttctcactatatattggttagttggcttcgtaaagcaaatcctgaattgagacagatgggtggtgccgtagagcctgatgaaggagaacactcaagctcaaattcttcatggcagtatagctcagggatggtggatgggggaaatgctatagcttcctcaactccttgtgagcctttccttctcctcaaggagaaagaagtttaaggtagccatgtgggtaggggaagaaaatggaggagaaagagtacgactctctgaattgcattgcagatatacctgaggtctctgtaaatattggagtaacttttcttgtctagtacaggcatttaatgaatattcattttgatccataaaaatgaattttattttcaaggagaatggtgcttgttaagacaggaggatgatagagccattcaaggtgtctcaatagctcagggactgaagtgaagcaactgtaaaagtccctaaaaatgttattatcagcgaagggtccttatcctcaatcttccccttttctctgtttcccttcctaagttttttctaacattttcttttatcactgaccctctctctgagtcttatgaatgagctgaagtaataacccctctctaattttattttctaccttttttttttttttaccagttctgccttcttagtttacatttttaaaattctcttttaataaaatattacatgtgcatgggtaaatgcaaaacttgaaagagagaaaaactgtacaattttaaaaagttccagatttttggttgaacatggttgattaaatattcatgtttattctctgctccctcctgaggccctagtgaaatgctaataaagaagttcaaagcctgtatgaacatacaaacacaaagtgaactgaaaagatggtgacagcacaagagagatcaacataacgttgaaggcgttgaaagcaaatggagaggtgacaaactggtttaaccaagagagaaaacctgtgcctgtagaggggaaagctgagagacagcagtcctgtgcattctgcagcattctggaaatgctcaagaattagaagcatcaattttgatggggaaaaaggcatcaggtgtggagggtagatgggaaagaaataggaagattaatggaaagactagcctcaagaaggagcagttggaacccagtgtaaccctcctatgtcctttgccacactgtaccacaggctgcaagctacctcaaatctggtggaagattaaaggttgaatctgattattttgaactagacagtctctggattagagaatactagagatatctgaggatgaaatgaggtgccataggcaaaacagggggattaagtgaaattctatatttctagtgttaagtccatcagctcctgtgcccaattcagtttaaaattctagttttccaaataaattttcatcagaatctaatatttgttgatgctgatgagaaatctaattccagtgggttaccccaattggagatttttttacttttatctccatacacatctggaattttttcccaacttatccttggtgttctagttttgctagaatacgtttaagtgtaagtctttttaattcagtgataatcacactttgcgggctattttcatctgaatatgcaatgtccttcagttgtgggaaaatttgttctatcacttctttagtaaatctctctcttctggttcttttttctaggacaaatattatttgcttgttttatctccaagattgattttctatgtagtagtatatttcagtgcatttttgactctttttcttctgtgtcctgagagattttctcaattttgtttttcagactatctgctgatttttataaagttttggcaacaatagtttagtttttaaagagctctttgtggttgttgaatttttgttgttgattcttttaggttacatgtaactagatatttttgaacgttctcttttattcttagaattttgtttccctttgcatcagggtttctgattcttttcttgatatttatatttgttgctttatactgaggcctagtcctccctgctgtcccttcatattataagaaggaaggactatacagctacaggtatttcctgtgtcattgtttatgtaggtctgttttccaataggtttccttgaagatgtgatttagctaaggaccttgagataggaaaattagcctggatcatccaggtggactcagtctaatcacatgggtttttaaaattggagaaacattccctgctgtggtcagagggagacgtgactatggttgaatgatcaaagagatgaaacattgctggctttgaagatggagggaggggttgcagaccaagaaatatgtgcagcctctagaagttggaaaacagactcactcctagaggcttcagaaagttataatgctgataacttgattttaactcaaaagagactcatgttgaacttctaacccacagagctgtaaaaataactttgtcttgttaagacatcaagtttgtgataacttgttatagcaaccgtatgtcaatttgcagctttttatttagaatatgtgaacaagggtttgatgctgctttcaacctcctcactcttgaacccctcaaactcctccccactctccaccagtgcaccaatgccagattgaagggttactcattacaatttatattgtagtctctcatatttgtgtttttttccccatgacttccacttctgtagttaagtcatcatctcctttacatttttattcttttatcagtgggaattttggaaagataggcagtgagcaggtatggtcatctgatatctggaattagaagcattattcatggacttcttataagtgagagacaatctacaggcaaaaagaagcaaggcaatgagaatcccaaggacagatttgatttcctgttgctagaaacaatcacagtcccagaaaagatgctttctaactttagaaaaaggtccctattgccctgaggaaaggcagcgtgtttctctcttctcattttccctaaaattgatctcctggtgtgacagttacttgtttagccccagggtctacaggctgaagtgggagggaagaaaaggcctctttcagaagaacaggcttctttcagaaggacagccttgctattgccacaatcaacactaccttgttttacaagacttgactcatttatgtaaaactactggttgcctatctatgtcagatttcatgatcaaacagctcacatatctttttttcttttagatgtttttcttagctctggtctgctggtggtactccttcttggattccagggtaaatgcaaatgtatttttactctgtccctagttccttcagaaattatttatattttactttgcaatgccttcatcaatcctctcagttttttctgtagatactaaagtctatcaatgatgtcttgatgatgtagtacccagaattgggtgtaatactctggttatgttcccagcaaatagcaatgttattttactctcttatctgaatatcatattataatttttgttgatctaaagccactgtatctttgtaattctgcttgaagaagacaaagataatcctactttcttttcctagatgagggctcatgttctaggtgtcaggcctctgagcctaagctaagccatcataacccctgtgacctgcacgtatacatccagatggcctggagcaactgaagcaccacaaaagaagtgaaatagtcagttcctgccttaactgatgacattccactatagtgatttgttcctgccccaccctaactgatcaattgaacttgtgacattccttctcctggacaatgagtctcaggagttccccaccagaacaccttgtgacccccgcccctgcccgcaagagaaaaccccctttaactgtaattttccactacctacccaaatcctataaaactgccccaccccatctccctttgctgactcctttttaggacttagtctgcctgcacccaggtgattaaaaagctttattgctcacacaaaacctgtttggtggtctcttcacagatgcgcataacactagacttttattttgtacatctgatcttatttttaattttaccaaagtaggtatctccacatcctaccgcaacctcctctcaacctgatgctcactgcaacaagaccatttaaagctcagtcagaagagttgatctaactatttttgcttaaaggatgtctccacagcttttatacaaagatactgagggactccaaaatctgctagattcattgtgagatctttttctctgtaaattcctcctctcttttacagtcctcatttttcattgaggctaggattaatgtaatatactacagagggcaacacagtacagattagggaagaaagaaatgttcactggaagtttttgacatgtctccaaacaaggaaagcacaggttcacttcttgtggggagtctgtatcctcagtcctgaatctggcctccagagggtgacgttgcacaagggacagatggctgtttccaatgatgatcaacaaacactttctgctcagccccttcttcctgcagctggcttactgaagcaccgtcactggagttctttgaagatgggacaaatggagagaatcaaagattgaaaagcacttaagattatctcagcagattttgtattcttaccaaaacaagagacttgcctagcccaaccttcctcacgctcgctattctcaagacctgggttccagccactttcctactggccccgaggagaatttccaaagagacgcctgcagtgtttccacagctcagccatgctcctgttgctcataccagtgctggggatgatttttgccctgagtgagtaacattctattatggtctctagttccacagaagtaactgttttctgattcaaatcttagtagaaatacttttcatagacaagtctgcactattttcactgatacaacattgattttttcaggagatgccagagcccagtctgtgagccagcataaccaccacgtaattctctctgaagcagcctcactggagttgggatgcaactattcctatggtggaactgttaatctcttctggtatgtccagtaccctggtcaacaccttcagcttctcctcaagtacttttcaggggatccactggttaaaggcatcaagggctttgaggctgaatttataaagagtaaattctcctttaatctgaggaaaccctctgtgcagtggagtgacacagctgagtacttctgtgccgtgaatgccacagtgtctgggactgcaaagggagctgaacacaaacttcctaaggtgctagggagaataactgcctctgaaagattttggattctgtcacagtagaaaccatgatgttagtatttttaaaaaaatttatttttaatttttatggatacatagtaggtgaatatgtttatggagtacatgagatattttgatacaggcattcaatgcataacaatgacatcacgtaaaatggggtatccatcccctgaaacatttatcctttgtgttacaaacaacccaattatacacttttagttatttaaaaatgtacaattaaattattattgactgtagctaccctgttgtgctatcaaatactaggtcttatttattctttctatttttttgtacctgttaaacatccctcctctccccgaccctcccactatcgttcccagcctctggaaaccatccttatcttctactctctatcactatgagttcgattgttttgatttttaaatcccacagataagtgagaacatgcaatgtttgtctttcttgcctggcttatttcacttagtgtaatgatctccagttccatccatgctgttgctctaacccaaaagcatgtgagacgggtctcaatcaatttagaaagtttatttcccaaggttaacaacatatctgtgacacagcctcaggaggtcctgacaacatgtgcccaaggtagctggggaacaggttgcttatatacagtttagggaaacataatacatcaatcaatacatgtaagatttacagtggtttgatctggaatggcagtacaacttgaaggggagcttccagatcataggtagattaaaaaattttctgattggcaattgtttatcaatagaaagcaatatctggggtataataaggggttgtggaggccaaagttttatcatacagatgaagcctccacatagcaggcttcagagagaatagattgtaaatgtttttatcagactgaaaatatgtgttgatgttaatgccagtcagcccttaaattccaaaagggaaatccaaaagggaggggggtataaatgaggcatgtccaatcaccccttcccattgtggcccgaactattttttcaggttaacttcggaatgcccttggctgagagaaggggtccattcagatggttggaggcctgagaattttgtttttggtttatattacaaatgacaggatctcattcttttttgaagccatgatgttcttattccacagtacagagatgctcagggacttgccaggtgagtgtgaagttgctatattttaaatggttgagtatggaaattgtgacatggcacagagttttgcttttcattcaccattttatctttcaatatccagaacaaaaggtgaacttccttttgtaagcatatcttcttgcatacttactgttctttcaacttggtaattttaaagtagtttccctggagtcagcactctgtgctgattattttctctcctttttaagtgcttcatttaggaaggaggagatttattaggatgctggatggcttagaacaatggcatgctcatgtacagtctagtaaccttgtcaggaaaactgaagaaaggagagtgaataactcaaattccttagtagtttttacagaactattttttttttgagacagagttttgctctcgttgctgaggctggagtgcaatggtgcgatcgtggctcactgcaacctccgcctcccaggttcaagcgattctcctgcctcagcctcccaagtagctgcaattacagtcatgtgccaccttgcctggctatttttttgtatttttaatagagaaggggtttctccatgttggtcaggatggtctcaaattcctgacctcaggtgatccacccgccttggcttcccaaagtgttgggattacaggcataagccaccgcgcctggccgtaaagaactattaaggaggaacaaaatgctaggtctacttggaaagtcctatttattttttgtttttcccacttataaagaccaattcttattcttttgattcttaaattctgcaaatccacattataaatcttcaaaattgatgaaatagtaacttttgccaattcttccaaatgatgttattttagtttttactcttattccagtttcatatggttgtacagttggaatattagaaacgaattcttatctgtttaacactgccataattaagtgtgtgcaaaatttagcaatgtctggcccctgaagacattctaattaagtattgtaatgggaataaaaaggtcgaagggcatgtgatagatatatgacttctcctggttaggaagaaaaaaaatgtacaaacactttttaagcttcttacttgaagcctttaaggttaataatgacttgaagaaacgtaaagagaaagaggaggaggagggttgggcttttttgttgtgtacctcctgatgctgtcatgagtaagaggaataggaatttgaagatatagataataatagtggattgtttccagtgatttacctaagccaaaggggacaccagtagggatcagcattatttttcaggtcatagtgttatggctatttgtggtatatacctttgggggatttctggaaatgaagtaagatatataaaattattgataagaaatatatacttatttaaagtcttgttcttcagattatattctctactgtccccaagagactgatgatcttcataagacttaaaaacacagctaagtcctgtgttccagaatgactgcaagcaggtactttatacactacatatgagaaggacaaatggcaatttctttcaattccaaactgaagctcagtaccgaggaaatataactgctggcaccaagaacctcaagcacctggaaatgcattttctgctctcacaccaacaaccttgtttgagatgtcagagtagttctattgatatgattgttttataaatgtaaataactttatataatatagatattaaggagaaggtagaaatatttaacttctaacacaattatatttgccatatgaggagactgtaacattttaaacaatattatattatttctatctcttgatatcaataaatacataaatgtaaagtttcaaattttaaaaaataaataaaacattacagacaaaattgccatctcttttatttttttcctcagttttaatgccttcatccctctctcaaaataaacctattatgaacttttttctcaactccatgttttcatatttccaaacatagattttttaaacaatctgtggtgctgtgttttgtgtttttaaaatttacatgaatgtaatccaattgtatgtgtaattgtgaaacttgatttcttccctcaaatatttttcagatatagaaaaatttatatatgtagtatatttcatttcttttagctgatacatactattccattttatggatatactatatgtcccttttgatgcacattggattgtacatttacaaagctcaataggccacgtaagtattggtttccctcataccctgagtgttttcaagaggagtcctttcagctgtctatacagttcacagattactctttttgcaatgcctccctcccctcctcccacgtcaagtgctaaggtgcgagggaataagaccgaacaggccatccagacttagaaaccccataccccaaatagaaaccggtatctcctgtaacagttataaaagtcactgctccagaactatgacatcttaaaaagtattcacagtccattcacagttcagatgcagtttatcagtcaggatcatttttaccataaccatcttacttggtaatccagctgacgttctacctttattggatttccagaaaaatagagattagaaagttaatctaatttttttcatgtggaaggagaaaagattttgttaatcctttattcaatgagtgtttctgatcttttattataaaaattctacaaggaatacaattatgtttccttatacatagatatagaatgttttatgttatacacctggaagtggcatttgctgggttatatgattcacatctttaacaacgtacttgcaattgccgaattgctcttgaaatattcttacctatttttccctcattagtagcacagaagaattcctgtctctttacacccttgcaaacacttattatttcttatataacatcctgccctctctatctgtgtttcctgcatttctcaagtaaagtacgtatagtcattttttcaagatttgcttctggaagaacccaatataagagatctggtacagaagtggtcatagagaacaaatacatagaatgagattttggaattaaattattcatggccagaagggaacaaggatcccattattagcagtaggtgcagtggtaatagagatgctaaaagatcatagcatcacaattattaattgtggtgaattggcatgggattcatgtgtaagttgttgcagtagcttatgtgatatacttagcatttgagaagtattgtgataatggtaattttatgtgctatggagctggctatttattgtcaagtgccatcagggaagagcaataacaaaatggaaccagctaagaccactgcatatttcaacatctgtattcaatggtgatctttggaagacaatggctgctgcttcccatctgcctttcaaatcttgtgtaaatgctcttttgtattcagaaggggattctgggcactgtattttccagtgcagctacatcaacaatagaacaatccaacatagaaagccaagagccaagttcactggtgtgctacttagttcaccagtgtgctatgttgcacattgtcaactgggcttctttctcgtcccctttaatatattcccttgctttgctagggaagaaacccaaactacaattcacacaatccctttcattcacttagttttaattctacaaatgagaggcatttgggaataatatcaggcaagtagaaaagaaagagaaaccattattcttctgtagggactgtatgcaggcagctcagattaccagctgtgaggactttgtttgacttctgcgtttcttcctaagaatcactcattttggtgtcacaggcagctggatgatgcatcacacctcaaaatttcctgtaatcagtctttctcatctttgttcattagcccctccaatggttgtatgtctaattttgtgtattaaatcttactttttaaaagagttttaaaaataacttttactttagaaagttaatatgtgcattatagaaagctgagaaacacaataagcaaagaacaaagtcattcaccatcacaagcactttatagtttgatgtgtccttctgggtcctgtgtatgtatatagacaacatccaattttatgtgtgattgagatcatacagtatatatgatgttttttcacacatcatgaatatttaccagttcaaaatcccaaggctatatgagcattttgataacaaggaatataccacatcaactcaatctgttagaaaaaaagtaatcctgcctttcttggggacaaaaatttcaaagaagacaaaaatggaaacaggcctctaggttaaaagtaccgtcagagttacaattaaaataccacattccctttaatggtcaatttaaaaagagatgtaaagcaacagagtatactaagtataatgtttctaagagaattctttttctgatctgtactattaaatattagcaagaaggtatgttttcattgcattacttagtgtattcctatagtacagccaaaagagatgcacatacatcaatagctattatcaaaatgtaaatataaacatatctgcttacacctgtccctttatacttccttctgcccttcagctgccaatctactgaacacatcctgatacatacactgctcagaggtggtttaacaacaattccatgtccaaggtgcagcttttctatcaagcataaaaaatacatttacaaagtagctaatccaccagctctactttttctcatacgttgtcacctcagggcatctataaagcttagatgttgcaaaataaagactgaactttatccacaataaacacaggcaggttacagaaaatgcatatataaatctatggttaaatccaaaaaagtcacctaagtatggagatattagcaaagaggccttccctccatccttcctcttctttcaccattctagtgactaagtacctgattacatccagctccaaaagaaggattaacaaaggtcactgccagtagataggccttcttaaaaatgaacaaaaggacttttagaaaggcgttattttactacctctacctttaacatactttgggcattaggacttgtttatcttttaatacacagcaatattaacaaaaacacatacagggccgggtgcggtggctcacgcctgtaatcccagcactttgggaggccgaggcaggcggatcacaaggtcaggagattgagaccatcctggctaacacggtgaaaccccgtctccactaaaaatacaaaaattagcgaggcgtagtggtgggcgcctgtagtcccagctactcagagaggctgaggcaggagaatggcgtgaacccgggaggcggagattgcagtgagccgagatcgctccagtgcactccagcctgggcgatagagcaagactccgtctcaaaaaacaaaaaacaaacaaacaaacaaacaaaaaacaaaaaccacatacagaacaatggttagacgatctgaactaatctaacttacaggcacaaagcttctctctgcatacttccttttctccctatctcccagcatacaatgaacagtcagcaacctctctaagacatcaagtttaacagttccattccccaaatgcagctagtcctgtgaaatcacaaaaaatactcaaagagtgtcactttagctgtcttaatgtacatactttaacatatgttatgtacactttgaaatatctagaaagactagattttcatataagaacttaagttttccgttatacacagagtagcattgaattaactactaatgctataatgtgatagagttagtttactaactctatacctttgtcatacactggtaacctctttagcatctagaaagactagatataaattaggattaatttgtcctttatatacactatatacacagataaggaaaacaaaatgcacagacgtaagagacaatggctaatgttgcctcattgtaagcacattgccacagaactctttacacttccttctcctcccaggagccagcacacaaacataatgtgtattactcaagaggtggtttggccattcccctctccagcccccagtcaacatttcatatgaattttaagaaacagatatttaaaaaatttgttattttctacctctacttttgacagctatgaagcactttagaacatcaagaaaggcaagatagggcaggcgtggtggctcacgcctgtaatcccagcacaccactgcactccagtctaggtgacagagagagactccttctaaacaaacaaacaaacaactacaaaaaaaccaaaacaattagccgggcatggtggtgggtgcctgtaatcccagctgcttgggaagctcaggcaggagaatcgcttgaacccaggaggtggtggttgcagtgagctgaaatcattccattgcactctagcctgggctacaagagcgagactctgtctcaaaacaaaaacaaacaaacaacccccccaaaaaaaacacaccaaaaaacaaaaaaaactagatctatacagagcagaggcctcagaaataacgccacacatctacaaccatctgatctttgacaaacctgagaaaaacaagaaatggggaaaggattcctgatttaataaatggtgttgggaaaactggctggccacatgcagaaaactgaaactgaaccccttccttacaccttatacaaaaattaactcaagatggattaaagacttaaacataatacctaaaaccataaaaaccctagaagaagacctaggcaataccattcaggacataggcatggacaaagacttcacaattaaaacacaaaacgcaatggcaacaaaagccaaaattgacaaatgggatctaattaaactaaagagcttctgcatagcaaaagaaactatcaccagagtgaacaggcaacctacagaatgggagaaaacctttgcaatctacccatctgacaaagggctaatatccagaatctacaaagaacttaaacaaatttacaagaaaaaggcaaacaacctcatcaaaaagtgggcgaagggtatgaacaggcatatctcaaaagaagacatttatgcagccaacaaacatgaaaaaaaaagctaatcatcactggtcattagagaaatgcaaatcaaaaccacaatgagataccatctcacgcaaggtagaatggccatcattaaaaagtcaggaaacaacagatgctggagaggatgtggagaaataggaacgcttttacactgttggtgggagtgtaaattagttcaaccattgtggaagatggtgtggtgattcgatctagaaccaccaataccatttgatccagcaatcccattactgggtatatacccaaaggattagaaatcattctgctataaagacacatgcacacatatgtttattgcagcactgttcacaatagcaatgacttggaaccaacccaaatgcccatcaatgatagactggatgaagaaaatgtggcacatatacaccatggaataccatgcagccagaaaaaaggataagttcatgtcctttgcagggacatggatgaagctggaaaccatcattctcagcaaactaacacaggaatagaaatccaaacactgcatgttctcactcataagtgggagttgaacaatgagaacacatggacacagggaggggaatatcatacaccagggcctgtcgggggagggggagtgggggagggatagcattaggagaaatacctaatgtagatgacgggttgataggtgcagcaaaccaccatggcacatgtatacctatgtaacaaacctgtacattctgcacatgtatcccagaacttacagtaaaaaatacataaataaaaataaaaagaaagacaagatatttcaaaaaaattcttagcattgtcaacaatatatacagtagtgaggaataaaatgcgcacataaagcagtggttataatatgaaaatgtctcctaagcatgaccagtctggaaaagaaccttctcttcattctcactgccttctgctccatggcctctaacccactgaatgaacgtggtggtgtgttgctcctggagtcacttctacagctcgtctaacaactttcgtttcaaagagtcatttccagaaggcgtttgctttctaccattttttaaaagaacaaatgggcatttacaagacgtgattttcttttttctttattttattttatttttttgagatgggctttcactcttgttgctcaggctgaagtgcaatggcgccatctcggttcactgcaacctccgcctcccgggttcaagcgattctcctgggattacaagcatgtgccacctcgctcggctaattttgtatttttagtagagatggggtttccccatgttggtcaggctggtctcgaactctggacctcaggtgatctacccgcctctgcctcccaaagggctgggattacaggtgtgagccaccgcgctcggctgacgtgtgattttctaactattatacgtcagcaaccttttaaaatctagaatggctaggtagagcaaaaattttcttttaaaaggttgagggaaaagttgagagcagctttttcatattatttacctgggccttctataaaggccagtaaatcctcccaaatggtggggggcatttccagtccaccaaatgtggcatgtgatttctctctttgggtatcaaggtctggtagaacaaacggcaaccacgcaatggcctgctaaccactccacctgtccttgtgggggctctgctcaccttctaggcccttttaggcctttgtccatcatttctggcatttttgggaggaggtaaggtcttgtctaactgggacaaagtggtcagcccgggacccgcatctgtgcaactccatggcataatgaagttcctgagcttgtgtctctaggcccaccttcttgggttctgcaaactactgcagccctcagcgccttctggcggccgccattcttcttcctctgcgacatccatttcctcccaaaggcacggtgtcctccgcagctcggtgagggcttcgccaaggcgcagcaggatttctagatgttctaaagtgctttatagcccagcgaggtctgggcccagagaggctgccgccatcagctcactgaagtggggagagaaggaggtttgcagggccccagctcacctgcctctcagtgcgctgcttctcaccacattgtctgcctgaactctaaatgtctttctactgaaaatatttggattgttttatgaggagaccgaggaccacctcgtggccatcaagcagatcatccagaggcaaaactccttgtctgaggaattcagaagtaattattaatcgacgtccctattatcaaaagcaggcatctagtaccgggcttctttcccaaaaatgtataagtaactagaatttctatacatctctggaatgcatgtatgttgaaacttattgtgcagcccttgctgacatcaaagcaccaaaatgtctacaaatgtaatcatttatcctgacctaggtggctaatatggtccaaattacccttaagctcctgctttaaggttcataaatgctcctaaggaaaaatccacggtggcttgctcagtccgctcttgctgaagcgccctgctgcactcctctgcagcactggttctaataaagctttccttttcaaacccacactgttgtgggtaaattcttattaccatgagccaatcactttccgttgctgtggcgctgacacctcgcccagcatttctgtttgccggactgcctctcgactgacaacagatctgtataaattcaagtccttgaagcggagcttctgaggcttgcagtcagaccatttggataaatctagtatcagctgggaatttgcttaagcattttttcattgattacacagttctaccgtatttcactcaaatctactgctacagttcttctatggtattcatctccttttgaaatcatggtgatatggcttggacctgtgtccccacccaaatctcatgttcaattgtaattcccagtgttgcaggtggggcctggtgggaggcggttggattactggggtgggccattcatgaatggtttaacaccattcccttggttctgttcttgaaatagtgagtgagttcttgtgagatctggttgtttaaaagtgtgtggcaccttcctgccctctctctcttgctcctgtttctgccatttaagatgccgtgcttcagctttgcctttcaccatgattggaagcttcccgaggctcccagaagcagaagcctctatgcttcctgcacagtctgcagaatcatgagccaattaaacctcttttctttataaattactgagtctcaggtatctatagcaatgcaagaatagaccaatacacctggtgtggaaaatagattccctcaaaagaatggagggttgttacaatactaaggacaaggtttccgtggaaaaagtaaagaaagttaggaacagtgaaactgcttgctctatatttctgtttagacttcaggtagagtcagttagatgaatgggccaaaagaaccaggaaaaggaggaagatgcagcttgatcacagagatctgacacagggtaagagggaaaaggaggagagcctttgtatagagccaaataatatccagatctaaattttcttcccaagtttagagtttgttaacatttacaccttgctgcagaaccatgtagctgctgtctctgaattcatggagagtgaatattccaggaagcacaatggaaggcgtccaggttcaaagataaatggtagtggggctgacagaaaaacagcatccttcttaccaagtttgtcctgggaacatccagagatttttattataagtcgactaaacaagaatagtgagagttaacagcaattgttttagctactgtgacttcagtactaccatgaaaggagaatctgtgaggattggagttttttcctcatgctcatcccacaagtgcttcactgataccttgtctgtctgcttaggtcagtgttctcaaagattattttgtgaatgtgtataacactggctgtatgacaaacacctgaggagatttttaacttccaggatcttgattctgaacattttgattttgtaagtgaggagatctccaaatctgtattttaaagatgatcaccaactaactcttacatgaagagaagtgtcatccttgctatgattctatacatcagcagacatgtctctaccaatcctagaagctgagatgggctttttctttggtcttttgaggcaaatccaaattatttaagtatcttatcccgtggtaaaaataactattggtcaatagtattggtggatggacatatgtagggggtatataatcaaggctaaatttccattaaaaggttagtatcacaacactttgcctcatgcacataggccagtcacattatctgggaatcatttcttctcctacaggagaagaaagtgatgccagataattttgtagggatttaatgactttagttactatattttttcattataagagttatatattctttactttttaatcaatatatacacaagatataatttccttttttctttgaaaagaatttattaattggaaattacaattaatttatttctgtaattgatgccttaaatgtgaagcaatatgatatttcaagtagtaacaattcctcaaccaaagaccattcatttattcatgcatttgtgtatttaagaagtgtttcctaaccacctgctgagtgtttgacattgtactaggtatgggaatacagcagtgaaaaaaagcttaagtctctctcatctcaaataatctactaatgtttaaacatgtgctactgacattcctctggttttatcctaaaaaagtgctaatacggtattttagtggatcatgggttgggcaaagatggctaaataagaaaaggtaaaatgaattattctcagaaatgccatggtatgaaaagaacttgcaagtcagacagtgtgctgttaaaaaaaacagagttataaaaaagaccaactattctttagatatacaaagaactatcagacagctaataggtgtcttagaaaaaaaaaaaaagccagaagtgaagatacaggattgacttttgaaagaacagtcaacaatcctttgagtttaggatcttgcccacaaaggggtgcatcttcctaacacattcacatttcctgctcacgctcatttcttcagtgtgaccttaacttttcctcacactaagaagacaagacccaagggcaccagagggtctaaaaatgaattcttctccaggaccagcgattgcactattcttaatgtttggtaagtaaaatggcacttaaaacttagaatcttttgttccattatgttgatgtaatctgtaaccacagttttctctaacgggtacagctaagatcacgtctaaggtaacttggtataatttgtttatttttttttcagggggaatcaatggagattcagtggtccagacagaaggccaagtgctcccctctgaaggggattccctgattgtgaactgctcctatgaaaccacacagtacccttcccttttttggtatgtccaatatcctggagaaggtccacagctccacctgaaagccatgaaggccaatgacaagggaaggaacaaaggttttgaagccatgtaccgtaaagaaaccacttctttccacttggagaaagactcagttcaagagtcagactccgctgtgtacttctgtgctctgagtgacacagtgacagggactgcaggggaagctgagcacaaactctgagcagcacgaggggcctggctgctgagtgtaagccactgtgatcccctctggttagggaccaggaactactctactattgttgcccaccacccaccctaggcactcctagtgtgaaagccatccaaataaactctaaaacactatagaataactaaaagtaaaaatacctcacaccagatgctttaacaatgagagtgaaaacagaatgtcaccatagttcctcaaccttgtttgaaatttgtgattttaaaagtataaaaccttgagataaatgaaatggtctagctgctcatccctgtataaaatgtagcctcctgaccttgtctcaggccatccaaggaaatagtatgcttacagacacagctgtgacagatgaggttgcaaatgcttaatgcatacctgagtggggtatacattcagctggggcaagatggggtgatttcttaggaaagcttctgcccaagaaataataggttcttaaagaaaaaaagaattataaatggaagaagtcaaattttccttgtttgcagatgatatgattttatatttggaaaaacatagagactccacaaaaaaaccttagaactaaaaattcagtaaagttgcaaaatacagaatcaacctataaaaatcagtagcatttctatatgtcaacaataaacaacccgaaaaagaaataaaaaagtaatcgcatttatgatagccatgaataaaattaaataactagggattaacttaaccgaagaagtgaagatctctataatgaaaagtataaaacattgatgaaagaaatcgaagaaaacaccaaaaaaaatactccgtgttcatggattgtaagaattaatattgataaaatgtccatactaccccaaacagtctacagattcagtacaatccctaaaaaaataccaatgacattcttcacagaaatagaaaaaaaatcctaaaatttatatggaaccacaaaagacccagaatagccaaagttatcctaaacaaaaagaacaaaactggaagaataactttacctgactttaaattgtactacagagctatggtacatgaaaacagcatggtactgtcataaaatcagatacatagaccaatggaacagaatagagaacccagaaacaaattcacatatctacagtgaactcatttttgacaaaggtgccaagaacatacactggggaaatgacagtctcttccataaatggtgctgggaaaactgtatatccatgtgcagaaggatgaaactagacccctgtctttcaccatatgcaaaaataaaatcaaaatggattaaagacttaaatttagatcacaaactctggaactactacaagaaaacactgggggaaatctccaggacattggtctgggcaaacatttcttgagcaatatcccacaagcacaggcaaccaaagtaaaaaggggcaaatgttatcacatcaagttaaaataccctacacagcgaaagatacaatcaacaacgtgaaaagacaatacacagagtggtgaaaaatatttgcaaactacccatcttacaagggattaataaccagaatatatgaggagctcaaacaactctataggaaaagatgaaataatctgattaaaaaaacaggtaaagatttacatagacatttctcaaaagaagatgtacaaattgtaaatgggcatatgaaagggtttttgacatcattgaccatcagagaaatgcaaatcaaaactaaaacgagatagcatctcatcccagttaaaatgatttacaagaaaaaaacaaacaaccccatcaaaaagtgggtgaaggatatgaacagacgcttctcaaaagaagacatttatgcagccaaaaacacatgaaaaaatgctcatcatcactggccatcagagaaatgcaaatcaaaactacaatgagataccatctcacaccagttagaatggcaatcattaaaaagtcaggaaacaacaggtgctggagaggatgtggagaaataggaacacttttacactgttggtgggattgtaaactagttcaaccattggggaagtcagtgtggtgattcctcagggatctagaactagaaataccatttgacccagccatcccattactggctatatatccaaaggactataaatcatactgctataaagacacacacacacgtgtttattgtggcactattcacaatagcaaagacttggaactaagccaaatgtccaacaatgatagactggattaagaaaatgtggcacatatacaccatggaatattttgcagccataaaaaatgatgagttcatgtcctttgttgggacatggatgaagctggaaaccataattctcagcaaactatcgcaaagacaaaaagccaaacactgcatgttctcactcataggtgggaattgaacaatgagaacacatggacacaggaaggggaacatcacacaccggagactgttgtgggtgggggaaggggggagggatagcattaggagatatatctaatgctaaatgacgagttaatgggtgcagcacaccaacatggcacatgtatacatatgtaacaaacctgcacgttgtgcacatgtaccctaaaacttaaagtataataataataaaataaaattaaaaaataaaatgtcttatatccaaaagacaggcaataacaaatgctggccaagatgtgaggaaaagggaaccctcgtacactatcgattggaatataaaatagtacaatcactatggagaacagttttagtttcctcaaaaaactaaaaatagagctactatgtgatccagctgggtatatacccaaagaaaggaaattagtatatcaaggagatatctgtaccccccgtttgttgcagcactgttcacaatagctaagatttggaagcaacctaagtgttcatcaacagatgaatggataaagaaaatgtggtacatatatgcaatagtaccattcagccataaaaaagaatgagattctgtcatttgcaactacgtggatgaaactggagatcattatgctaagtaaaataagccaggcacagaaagacaaatatcacatgttcttacttatttgggggatctaaaaatcaaaacaattgaaatcaggaacatagagagtaggaggatggtctgaggctgcaaagtagtggggtgggagagggagatggggatggttaatgggtaccaaaaattagaaagaataagacccaccatttgatagcacaacagggtgactatagtcaacaataattgtacatttaaaaataactaaaagagtgtaattgaattatttgcaacacaaaggataaatgcttgaggagaaggacaccctattctccatgacgtgactagttcacattgcatgcctgtatcaaaacatctcatgtactccatgatatatacacctagcatgcacctccaaaaagtaaaaataaaaataagtaaaaatttaaaaatcattaattaaaaaagaaatataagaaataatggagaaggagagagtagaacatgtgatcacatatatggaaaaagaagatggaacatttcttagtttctattttgggaaattacatgacatgcatagactggttttgcccaaaagatgaaactaatccctaaaaaatatgactcatggccaggcatgatggctcacgactgtaatcccagcattttggcaggctgaggtgggtggattacctgaggtcaggagtttgagaccagggtggtaaaccccatctctactacaaatacaaaatttagctaggtgtggtggtggttgcctgtaatcccagctacctgggaggttgaggcaagagaatcacttgaacttgggagacagagattgcagtgagccaagactgtgccactgcactccagcctgggcaatagagagatactctgtctcaaaaaaaaaaaaaaaatgactcatgcctaaaagataccttgctgagatattatgacagtagagaattttagtttgcatgatatctcagcaagatggctttctctcactaagacattacttaagatatataggtagtgttcagattctggaagatgcaaactattgagatgaaactttttctatgtagattggtgtgagaaaggaatcttatagcttccccaatgtctttcaagctatttcttctacagaaggggagtaacagatgaagtggtagatggcggccagggctatgagaagataaagaatggcaaaaagaagaatttttggatttaattgcagatatcttggcatctttgctaacattggagattttcttttgcttgtctattgaaggtgcttaactcatatcaatcagtttattgacccataaggagtgcatttttgctcattataagggtccttaagcacaaaaagtgagagtaagaggatggtatgcaagatcccctgtttcacaggctacaaaggaatggaactattcagattagtgatataataattgacactgaagatgccttgactttgactcttcatttttcatgatcaccctgctttagtttctctcttagcttttaattttattccaaaggcctcaatttagatcttattagttagttgagctaataactacctatacaaaataaataatttatgtacatgggaaaaataactttagatggttcaaatgactatgcaaaatatctctgacttttggctaccacatggccaggttgcaaattttccaaacttttttggcctgctttccttttacatataagttccaatttcagatcctttctttgctcacagatataagcataggctgttacaagcagccaggccacatcttaaacactttgctgcttagaaatctcttctgccagataccctaaatcatcactctcaagttcaaagttccacatatccctaggcagagacacaatgtggccaagctctttgctaaagcaaaacaaaagtgacctttgctccagttctcaataagttcttcacttccatctgacatctcttctgcctggactttgcagtccatgtaactatcagcattttggttacaaccattagacaagtatctaggaagttccaaactttcccccatcttcctgtcttcttctgacccctccaaactgttccaacctccaactgttacacagttccaaagtcgcttccacatttttggttatcctttcagcaacacctcactcctggtaccaatttactgtattagtctgttttcatgctgctgataaagacatacccaagactgggaaatttacaaaagaaagaggtttaattggacttacagttccatgtggctggaaaagcctcacaatcatggcagaaggcaaggaagggcaagttatgtcttacatggacggcagcacgcaaagagaacttgtgcaggaaaactcccccttataacagccatcagatctcttgagacttactatcatgagaacagcatgggaaagacttgcccccataattcaattactttccactgggccctcccacaacatgtgagaattcaagatgagattttggtggggacacaaccaaaccatatcaacttctttacttactaatatgcatttaaggtttctaagtgcttttcatgtcttgatagctcatttctttttagtagtgaataatattccattgtctggatataccatattttatttatccatttacctcctgaagggcatcttggttggttctaagttttggcaattattaatatagctggtataaatatctctttgcaggttttggtgtagacataagttttaactacttttggtaattaccaaggagcacaactgctggactgtatggcaatagtatgtttagttttgtaagaagctgccaaactgtctcttaaagtggctgtaccattttgcattctcaccagtaataaatgagatttcctgttgttccacatgctcatcagcatttgatgttgttggaggtctggaacttgggcattggaatagaagtgtcagggtatctcattgttttaatttacgttttcccaatggcatatgataaaaagcatcttttcatatgttcatttgtcatttgtgtatcttccttggtgaagtgtctgtcaaggtctttggcccattttttaatcaggtcgtttgttttcttattattgaattttaagtcttcttgtatattttggataacaattcttttttttttttttttgcaaatactttctcccactctctggtttttcttctcattttcttgacattgttttttacaaggtagaaatttaaatttttatgaagctcagtttattattgatttctttcatggaccatgcatattgtgttgcatttaatgactcattcccatgctgaaagtcatctaggttttcttctatattatcttttggagttttacagttttgcattttacatttaggtttataatacattttgagttaatttttgaagactgtaatgtctgtgtctatattcattttcatatgtatatatattttttgcctgtggatatccagttgttcctgcatcatttgttaaaaagactatctttgccccactgtattccctttgtttctttatcaaaaatcagttgactttgtgtatgcaggtatatttataggttctctattctgttccattgatctatttgtctcttctttcataaatgacacactttcttaattaatgtagctttatgttaggctttgaaattaggtaatgtcagtcctttgatttcttcatgtctttcagaattgtgtttgttattctggttttttgcctttccatatatgctgtaaaaagaattcatcagagtccctccaaaaatcttgctggacttttgattgttattacaccgaacctgtagatcaagctgggaaggataaacattttgactatattgagtcttcttatttatgaacatggaattcttcatttctgtagttgtcctttgatttctttcatcagagttttatagttttctttatgtagatcttgtaaatattttgctagatttatacctacatattttaccttttgggtgccaatgtaattgttttctgtttttagctcaaattccacttgtttattgctggtatataagaaaatgaatatgtatataacgtatataataataaataattacttatatacaatatatcatattttatatgttaaccttgcatcctgcaacgttgatactattgcttactagttccaggagttttctttttgtcaattcttttggatttttttatgttgatgatcatgtcatctgggaagaaagttttattttttcctgcccaatctgtatagcttttcttttcttgtcttgtcttattgcagtagctaggactcctgatatgatgctgaaaaggagtagagagaagggacatccctttcctgatcttagtgagaaaacttcagttttctcattatcaggtatgatgttagctgtaggttttggtagacactgtttactgtattgagaaagttcttctctattcttgttttactgagttttttttttgttatgattaggtgttgaattttcctaaatgctttttctgcatcattgataagatcatgtgatttttcctctttagcctgttaatgtgatgaattacattaaatgactttcaaatctgaaccagtcttgctatttgttgcccttgttctttgttcttattctgtcttccactctttttttttttttaataattccttttctggtttttttaaggattttttttttaatctatgattttcttttttcttttattttggtggtggtggaggtggggacacagtctcactgtgcccaggctggagtatagtgatgtgatcttggctaactacagcctcaacctcttgggctcaagtgatcctcctgcctcagcctccagagtagctgggaccacaggcatgcaccaccacgtccagctaatttttgtattttttttttttttttgtagagatggggttttgccaagttgccctggctggtctccaaatcctgagctcaagtgattcacccaccctggcctcctgaagtgctggaattacaggcatgaaccactgtgcccagcctatctatgattttctataatttgaataggaaatatttaggtattttgttttgttttggtatatatcttgctgtgtgttctctgagcttcctggatctgtggtttggtgtctgacattatctggggggtaattctcagtcattgtctaaaaaaaatcttttttgattaatttctctctttcttctctatctgatattccccgtatgtatatgtgatactttttgcaactgccctacagtttttagattttttttccattttttcttttgtctttgttttctttgcttttcagttttagatgtttctactgatctgtccttaatctcagaaattctttccttggctgtgtccagtctactaataagctgatcaatgatattcttcatttctgtgacagtattttgatctctagaaattttttgttctttcttaggatttccatctctgttacattgcccatctgttctggcatgctgtctactttattattagagctcttagcatatttgttttaaattcctggtctgataattccaacacccctgatgtgtttctctgatgcttgctctgtctcttcagattgtttttgccttttaatatgccctgtaatttttttcttgatagccagacatgatgtactgggtaaaaggaactgctgtaaatatgctgttagtgctgtggtggtaaggtgtgtggggaggggaagtgttctataggcctacaatttgttctcagtctttgagtgagcctctgggctgtaaacttctccagtgtttcttagtctccctcactcctcacacaccctttagctgggaaagaactcaagggtgggctgaagttgggtatttctcttccaccaggtcagttaacctctgataaaaccccaacaggttaggctttggttaactggtttctcctgagggcagaactttgttaaggacagagtgctgcagtgtatttcagaattattccttttcctctatccatgctggaagtgcaaggggatttttctgtgatatttactgtggaagcctggtcaagttgctgaagataaaacttataaaagtgtggccccagcctccccaccccatgactcagccttcctggagtttttgactctcagacttgtcctttctgagcctaaaacagttttcaaaatacagttgaggttttcctacctcagcaatggttcccataaatgcttctgcttctgagtctttgttccagtaagccacgactccctgcattcacctaattgtccaatcctgggggcagtggtatgcccgatgtcctcacctttattatggatccaagatgaattgttgaattttcagtctgttctgctttttacttattaggagtgagtggcaactttaaagctccttacatgcagaaccagaaactagaaatcatctgttattgtctttttaatataaattttgaagaacattctctatattaagaaaacttgtcatataaccatcatataatgtatacctatatcttcttaaaaagtgtattatcattttgactttacttatgatcttgtttgtcatgcagaatttaaaaaatactatatagtcaaatttatcaaaacttttttcatggactgtgagttataagccctgcttaaaaatccataccactccaaaatggtaaaattttatactgtattttctttagtttttcagacttttttgtatttaaatttttaataagagtgtgtatgtaaaaaatgagattgatgtccagggatttttatttttcttatttttttggttcattttgaggctgccactcatgctcaacatccttttctgaataactcatttttcttcattgatttaaaatgttatatttgtccattttccacgtttcttatttttcgctattaaggttttcaacttaagcattaaaaaaatccaaaatggattgtttattgttaatggtgcataataccaatagcttactgaatatgagagtaatatgcagccagtcatcactgagctcatgctagaaataagtatgggattatgatgtgaatagaaggaatgttactagaaatggagaaagagataaactgtgagagtgtgtagtgaggtgtcacctaaggcaatgtaaactatatgcctgtaatctcaaacttgtcagttgtttccagttgagaggactcagacaaagcagtagaaaatcatgctcataaattgttcactgagtaagaagtagacaaccagctttggaaaacaatgacaacttggtatcttctttgttcttcttgaagaggagaaattaaatagtcaacacttggttttagagttctgacaagttccaactagttgaaatgccttggaatttgcagctacttcaagtttgggatgctgtcattgttctggaagaagatttttgaattttttctgttaccacatatgctccttgatgatgtttagttatatccactgtggaaactatcatagctctccgagaatgttgttgaaaattgattatatttcaaatatagtgcccctaatttaagcggaatgagtatggacaggtcttttttgctgagatttcttcttcctgcctctccctctccttcaccctcttgttcctctctctgtcctctgtcctcttttctttctcttccttgactttgctggactgattccatgatcctttcctgaagtaagcatctctgggggatcaacccttactttggactacaatgccattgccatcaatatttaaaagtaatctcaccataagataccatctcacaccagatagaatggtgattattaaaaagtcaggaaacaaccgatgccattgaggatgtggagaaataggaatgcttttacactgttggtgggagtgtaaattatttcaatcatcgtggaagatggtgtggcgattcctcaaagatctagaaccagaaataccatttgacccagtaaccccattactggatatatacccaaaggattagaaatcattctactataaagacacacaaacatatgtttattgcagcactatttacaatcgcaaagactgggaaccaacccaaatgcccatcaatgatagactggataaagaaaatgtggcacatgtacaccatggaatactatgcagccataaaaaagaatgagttcatgtcctttgcagggacatggatgaagctggaagctatcattctcagcaaactaacataggaatagaaaatgaaaaaccagccagtcacagtggctcatgcctataatcccagcactttgggaggccaaggtgggtggatcacctgaggtcaggagttcaagaccagcctggccaacatggtgaaaccccatctctactaaaaatacaaaaaattagctgggcgtggtggtgggtgcctgtaatcctggttacttgggaggctgaggtaggagaatcacttgaacctgggaggtggaggttgcagtgagccgaggtcatgccattgcactccagcctgggcagcaagagcaaaactctgtttaaaaaaagaaaaaaagaaaagaaaactgaacaccgcattttctcattcacaagtgggaggtaaaaaatgagaacacatgaacacagggagggaacatcacacaccggagccagtcgggggttagggggagagcagagggagagcattaggacaaatacctaatgcatgtggggcttaaaacctggatgatgggttgataagtacggcaaaccaccatggcacatgtatacctatgtaacaaacctgcacgttctgcacaagtatcccagaactttaaaaaaaaaaaagtaatctcattgtagaggaaagcagctgttcacaagagcatataaaactaacaatggatctatattatttaggttcacgcagatttaagactgtgatgtctacatgcaactctctgtatatatctatctgtattgatagagatatgtacatatctatatctgtatctatctatctatatagagagatttattttaaggaatagtttcacacaattttaggggctgggaagtccaacttctgcagggcaggtcgtcaggctgggcaacctgggaatcactgattttgcagtttgagtttgaagacaagtctggaggcataatttcttcttctttggagagcctaagtgtttttcccttaagaccttcaactgattgaatgaggtccattcacattatgcagaaaatctgcattactcaaagtctactgattcaaatattaatctcatctaaaaacaccttcacagtgacatctagactgatgttggaccaaatatctgggtactggggcctatctcagtggatgcataaaattagccatcacacggtctttacctctagcaaatcttttccaaaagcctactttgcttatacaactataatataccaactttctttttattgtttctcgtataactatttccattctttcaacttctctgagctttaaatttcaaacttaaaataaatcctcatatatctacactctcaaatgttcataagcttcttatttcactgagaaaatagaaacaatcagaagagaattttcaaaaacttcaacacttaccagtcacttgcatctatgctcaaatactctgtctttcctctcattagaatgtcatcccctgtgtgcagggactttgcttattctcagcacttatcatcatacctgaaaatgtaggcatttgaaaaataattgttgaattaaaaatgaataataaaaataactctgtcattaccagaacaaaactatcatttattcattccctcaataaaaatttattatatgcctatttattgacaggccttattctagtaactgacaatgtagcagagaatagaacagataaaagtccctatcctaagggagcttatatttcagttgaaggctaagttcatgttagccactacaataagcctttacatgaatcatctcttcaatctttcaaaaattgttaggtaagtgttatcatacctattttcagatgagaaagctaaggctcaactctcctatttaatatcacatagagccagaatgcagagcttcaaatatatgtctaaattactaatctactgtgctgatatagacatgaagggctttatcctctatatcatgctgcaaataggaggaaaaaagcttgatcaaaagttctaagcaattgtagctctgaccccaagagggcagtatttgcattcgtcccgcctgcaggtctgaatgtgtagtatgtgtaacatagcgaagctggtctctgattggctagggataccctctgagaaaccctttggttagtgttaaaaaaaaagagaagatgttgaatacacaagtcaacttctgggagcagatctctgcagaataaaaatgaaaaagcatctgacgaccttcttggtgattttgtggctttatttttatagtaagttagtggagagttttagcaaagttaacatagtaagtcaagggaatattttcttaggatttggggtgaagatgtagtccactgggataggaggaagggagaaaatgggaccattttctgtttcacttgggattcattgtggggagtaaggaagggatgcaaattagacagtattaatactggatgatggatctcttgaatctcacttttctttctgaataggggggaatggcaaaaaccaagtggagcagagtcctcagtccctgatcatcctggagggaaagaactgcactcttcaatgcaattatacagtgagccccttcagcaacttaaggtggtataagcaagatactgggagaggtcctgtttccctgacaatcatgactttcagtgagaacacaaagtcgaacggaagatatacagcaactctggatgcagacacaaagcaaagctctctgcacatcacagcctcccagctcagcgattcagcctcctacatctgtgtggtgagcgcactgtgctccacaggcacttgaagccagtatgcaaacctgcacctggaggttatcaaggaggcataggagttagagtagaccgttattttttatgcagaatatgatttcactagtgaatatttatctctccgacatgatttgatttgagcttgagcctaaagttctacttaggctcaagtagaatacatgtcctcaagcgaggataaagacattctcactcaacacacaaagttaattgctacatctgggtgttcccaagggcaagacagtctgtcatgctgtgttactattgctgaagtagatgacagtgttgtttggaagggagagactagcttggtttttgatctggacacctaccagcagaatgtcaactaagtgaaagagcaacaagtttatgtggctgatggaaatttttttttttttttgagatggagtctcactcagtcgcccaggctggagtgcagtggcgtgatttcggctcactgcaagctccacctcccgggttcatgccattctcctgcttcagcctcctgagtagctgggactacaggcgcccaccaccacgcccagctaatttttttgtatttttagtagagatggggtttcaccgtgttaaccaggatggtctcgatctcctgacctcgtgatccacccatctcggcctcccaaagtgctgggattataggcgtgagccactgctcctggccggaaatatcttgagaagtttccttcccctgaaagacattcagttgtcatttcatggctattcaagttctcagaaagcatcctgtgagaataaatctgctcttcccatttagctatgctccagatcaaggcttttgtccaggtgctgcatcaactctttattatcttccatcactgctcctttagaggacactggaaggccaggggatcctggcagacacagtcactctcaggcagcagaacaactgtgccaggcttttcaaccatcagtgttctagaaaagagacttagggacagaatgcctacctgcaattgtgaactctggttttcacaacttagctgtgaagttctttttgggacaattagagaaatgtacatataatttgagaattagatgagaaaagtacttatttaaaaggcagatatcaactgtaaaaaaatgggaagaatatatactaagatattaaaaatggtaatccttgtattgtgggaatataatgtttttactttttatctttccttgtcttctgtacttttaattttctatagttctcggatttttcttctgtcaaaataaagattattaaaaaataacaaatgtcttaaaaaatttaaaggaatgcatctcatctgtcactatcaactcacaggaattgatatttaaagatgatcacacatttcaggatattgttgaataagattgatttgttatgcttatgagcactgcaagtaagttcatttccaagttcagtgaattgataatttgtgaataaatgaagccaggacctggactgttctttgtaactagtctggagatagctcaagtgtcaagacatcaaaatgccttgacttctggagcaaaaagtaaacctagatatattcagtaatcagatattttttcctgtcctgtatctcctttcaagtctttagagtgaagaaattaatgttcagattgctgctacagcagacttgtgtgagtaatcataaactaattgaggaaaaagataaaatacatgaaaatggaatcaataggtaaaattccaagtacgtggacaaataagttttaaaggtattctcaggaggagattactgtgggacagaaaagataggagaaagtatcatggggaatagcaaatttagttaggtcttgaaggagagacacacattgaatttgttcattacacaattatttaattaaacaaataatgaggccaggtgccgtggctcatgcttgtaatcccagcactttgggaggccaaggtgggcgaatcacttgaagtcaggcattcgagaccagcctggccaacatgaagaaaccctgtctctactaaaaatacaaaaattagccaggcatggtggcatgcacctgtaatcccagctactagggaggctgaggcaggagaatatcttgaacccaggaggcggaggttgcagtgagctgtgattgcacatctgcactccagcctgggcggtggaatgagagtctgtctcaaacaaaacaaaacgaaataaaaaacaaataataagtgacaggtgtttttgtaggtagaaggagtagggtaataaacaaaatagataaatgcagacacaaaagaccttccattacgaggcttgagtctatgtttgtctattgcgttcactttcttttacaggaatatcttgggaagtttgcattccaatataggcatttccttgcttgctttagtttagtttagtttgcaggtttcatatggtgagtaaaaggcacaggcattgaaatgctctatctatcacttactaaattgcattactctggacaaaattacataacttcagagcacctacgcgccatcaatggtaattacacgtacatcacatggtcataaggattgaattaagttaagtgaatttaattaaatgattgaattgcattggtagaaaataatttttcaactaatggtagttattcttgtacataaatgataaaacaaaggtaatttaaaataagacaataagaaactttaagtatagattaaggtttacctttccactcttcttctgttgattatattcttttactacagttatggccgagagtcaccctttatttcacattggccttattccattcaattatttgaactgacagtattggctttcttgtttgtttgtttgtttgtttgtttttatctcataggttttctgcacagaaaatgaagctttcttgcttccggtgtaatttaatgtaaattctatgatgaatccacatgagctttatggagcaggactccgatataacaccattatactgacctacagtgccaataactagatccatacccaggagctcatttaacagagctctgcattggaaaggagagaaagtaacctttctaggtttgggggagaaatcctttttagttattcaatttataacttgtacatacatggtagatgcccaggaagtattacagaagaaaaaaggaaagagaaaaatctaagggacaaatgctagatgcagctgactgagaatcagcacctggttctgccagggtccttttccatgctacctcttcagagatcaggaggagctgtgtgatctgtgcaccggggagtaaatcttgtttctggctggttggggagactttcagcttcctgcaacaaagaactatgaatataaactcagagaaaccagagatttggcttgatagtgtttgagggctcccagaccccagccagagacctcactgagtctaagtgataaaaacggagaagcccttgggagtttcattcttgatttcctcctggcagctgtgctgtgagttgctgggctctggaaatatcataaaaaagagcagattgtagtttcttctttataagtctggaagttatagaagggtggttagggtctcagtgctcacctgtgggggctgtgaaaagagagtatatcttccaaatgaatgaatttccgtgaatgaatgtcctctgtctgtggttctctgtttaaacaggggtgaatagactacatacactggagcagagtccttcattcctgaatattcaggagggaatgcatgccgttcttaattgtacttatcaggagagaacactcttcaatttccactggttccggcaggatccggggagaagacttgtgtctttgaccttaattcaatcaagccagaaggagcagggagacaaatattttaaagaactgcttggaaaagaaaaattttatagtgtttggaatatcgcagcctctcatctgggagattcagccacctacttctgtgctttgcagtagtgtctccccagcacctgcagcctgtaccataacctgcagccgggacccttgacacaggctagccttgcaggtgggagtgaagattttttttttttttttgtatagagggaactttctttatgacccgcatctccaaaatagaagtgaaggataatgtatctttcttatgtaatgaaactgaatttatattaaattaaatttccttttgttattatttaaatttcattccttgatgcagtttgtacagattctgagcctgtttgcccacagattccttccactgctttactctttaagaggaaagacccctttgtggtgcaggctctgagtccatgaagcaagttttctccaggctataccctcatcaggaacattttacccatttgatcatatcttcatgatgtttttgtaccatctataccattatttacttaatttaatattaaattgatgtttatgttaaatagactttaaaaataactatgtaaaattgtcttcattttaccagataccatctgtgaaaccatgtatatgatataaataatatatttaaagtgctgcttatatttttcccaatataaattaaaatagcatcatatatgtaacaattgaaaaggctgtctgtatactgcctaataggacctcttgtatcaatcacactttaagaaatactgatccagcccatacccctcatttcataaatgaaagaattgagatccacaagtatggtatcatttactcaagcacgacttacagtaaaatgaaagctataaaaagagtctaggctttatgatcccttgtcagttgcttcttccaccaacgatgcaaagcaggatctaaagtttgaagaaaagagttgggtgttttacatttaaattaaattaaaagttttatttaattgtgtatgttcaacctaggtacattagaagatacgactacctatcaaagtagagcattctcataacttcatcgcctagaaataacaagtatttatttttcaaattttcttgtatacatatacaactacatttctctatgaatggggctgataatgtccccagtatttattaatgtgcttgcttctctcaacattatagatatttccatgccagggatcttatattgaggatataattttaaatgactgtctagttttcattatatattttttaaaaagtgaatcaccttttgataatatttctaattatccagtattatagacaatgtttttattaacatcattcaagtcacagctttcacagaatggagttgggtgaataagggaaaacacataacactgcatatctaattttcaggaagaaatttttcaccaaattgtgattccaacaatagcatgtaatgctttttgttttccatactttctttacctgttatgaacattattacttgaaagaagtttccactttgccaagtaaaatttttaaatgttttgactcttttactctatgaagttatacatttgttattaaaaataaatgaaacaggattagaaaacatacagagtaagagtgtttcacacaacataagtatcttcatacaataagatatgttaaagaagaactttgaaaaacactctcatggtcccatttaccttccaatgttctctttcctttcaaggctatctattctccacgtcgttcctactgtaagtgtggaccagcactatctgaacttgtgcggaatctcaggctgactgaatttgaatctgcattttaacagaccaaccgtgtgattctatccttcaaagtttgagaagcacccctttcatggggtgccagaatgattttttacaatataaagtaaaagctgtctctactagcccaaaaatgcttcaatggctttctattgcttctagaataaaaatgcaaatttcaggctgtgctacacaaagatatgtatcatgtgaacctccttttcaatctccccttttaactctcctagctctctatgtagcaataacactattctcctttcagtattctgaacttgccatgttcttttccacatttagtcaaactcgtccatttgaaatgctcttcctccaaatatgggcaagcccaattcattttcacatttcagatctcagctcaagtacacactatatagataaagacttctgacttctgttgatcttcgtgactaatgtagccatccatggctctccccacagctttatcacaaaaccctagttatttcccttatggtaataatcataacatctagttataatgttgatttacatgccaatgtgttcattgcctaaacttccaattaggatacaacttctatgaggtcagggatattgtttgtttaatcacacctttaactttagtgcctacctttagtgactgccccataatagtcagtgaaaaaatatcttctgcatgtggctgggcgtggtggctcatgtttgtaattccagtactttgggaggccgaggtggaaggatcagttgaggtcaggagttaaggaccagcctaggcaacatagtgagaccctcatctctacaaaaaacaaaaataaaatattaaatgagtgtggtggcatgcgcctgcagtcctagctactcaagacgttcagacagaaggatatcttgagcccaagagttggaggctgcagtgagctatgatggtgccactgcacttcagctctgggtgacaaagcaagacctcatctcttaaaaaataaaataaaataaaataaaaaagaactatatacagaatgaataaatgaatgttgcttggccttgcgttcttttttcctttcgctttcttctcactcccatcctagcaaatctgaacttcgtgtatgtgctccctgctcagatatctggtagagttctttaatgctggcacttaccccttgtctccggaccaggccttcctatgctcagtgaactctgtcaaataactagatcaactcagggtctcaatctgtcctcactcaattgacatcaggtgtaatctgaatgaactgagcaaactctaaacataatcccacagtaaaacatctgaaagaaaaaaaaggtatacttaaaagatgttggaaagtatgaaatcaacttcccaaatcaaataaatgataagcacatgtcaaagtttaatctcaaattattgcaagagaaaaattgcatcaggaaacacattcaaataattggactaagtagagacattttatagaaactagtttttttttttaaagtcaatttaaagataattattatggtcaaattattattggttcataatgactgtactctgtgtagtggttgttagactcatcatgagattaatagtcatctgagattataacactaatatctcagaatgagtctttattttagtaaagaatatcagaaaattgatcaaatatttgatcaggtatgatagttaattcccatatggggctatacattttatccttcaaaaaagtttcattcaagaccagttttgggaaatttattgttgtcaaaagtaattcaaaccaagtgtggtgatgtgtgcctgcagtcccaggtactcaggaagctgaggtgggaggatcccttgagcccgggagttcaagtccaacctgggcaatatagtgaaacctcttctgtcttaaaaaaaaaaaaaaaggtaattcaagtctttagtgtttactataatggagaggagggatttgtcaggttttggatgttttcccttcctacaagttactaatcttgtttgattgaggctacagtaaatatatgaaactacttagagacaaaggattttgttactcatgacacagcaaacagcataaacattgttatattcacttcagtcgttctttcccttaaatctaaaaaagatgatatgtatgctgacgaatactttgtttgaagtggtactgtgtcataactgaggaactttgagctcggagaattcactgcttttatagtaaggagtaaaccaaattgctctttgtctcagagggaaacagtacctcacccctcaaggtttcttgctgcaagcataactctggaaattggtcaggtagagtggtcatggtcgtaaaccactggcatacctagcaagacatttatgagtataagagattaaggatggtctggttttcaacaatatccactccatattcttacattgtgttattttctagaaacttttctcatgagtgtgccactccagaagccgttctgatcaatttgacggacagagattccgagactaaatacattgaatttgcctcaaacaatgtttaaataaggctactatcagcagaccaatctgcaacattaacttcacccatttagtcagctgtgacaaagtcccaaagtatagataactaggatataatttcttatccattatacatggaagtttagattgatacgctaatctttgttttaattctcaaaaagagtccaaaaagtagccaccattcctaatggaaagatgttctgtcccacctattcccagacataagcataacccaacaggttaatccagtttggaatttattgttaaacttgatttggatcagcattacatcacttttgttgtaggatccttggggtgttgcttttctgaccagaaacctctgtggttggtggtgcctttactcaagttttgcatgggccccctggactcattccacttacttggcctggaagactatgctcagctcatgctaccggcctggatcttatgcttgccaagggcgagtcaggcatggagcagtaagggatgtgtgaggaagtgtggggtcttgccactgcacagtcagacatgctggctgctgcagtgaggtgggcagtgctggcatgggtgccagctgtctacaagactgaggctagaccagttgcactgcaagcagcattgactgctggcactggggaacacggtggcactcaaaagcttggagatgccaggaaccatagggtcccaaagaggggggtcatagccctgacttggggagctctcaggtctgggcttcccacagggccacagcacttctctccttttttttacccacaatgtggtaaacacgggacatgtttcagccctgtttgtggaacagctcttttagccccaccatttgatgggttccaagttcttgtcctgcaaccaggaagaatgaggtacacagtcaagtggagggtgagcaagatgaagtagagctttattaagtgatagaacagctcagaggagacctgcattgggtagcttctttccacagctagggtgttccaatgagtgttcagctcgtagcagagaggagaccctggagtgggaaactcctctctgcaggcaggctgtcctgttgtctctgtagctctcagcacagaggaggccctggggtgggtagctcctctctgcagctggttgtcccagtgtctgcagctctcaatagagaggaaggcttgtagtggttagctcctttctgctgctggtcatcctgaggtctgctcagctctggctgagcctggggcttttatgggcctcagaagggaggaagtgcatgcccaatttatccatgggcagccatgggcaggcccagaaaaggcaccacaagttcccattccagtctgtgggactggcagcctgacatccagccttcaggccctccttggcctgaaggtgtgacctcactggggacccaccacttccacccagaaacctgtctgcctcctactgtcattcttagtgcccagatggtaggtgccaaggagtgccttcaggccagtgcccccttggcttccctcttatgcttgtcagtgcccaaaatctggagggtgtcaaggtggcagagggctggtgtgtgaacacttcccctagtgtgtgcacactctactgtgctgcaacagtgcctgggcttggcctcaactttgctctgagatcagagtggatgctgacaacaaggagaagccaggcagtgagagtgggtacttctgagcctgtgaaggcagggagggcttcccaggccctcaagagtacacagaagcctcggtccacagctgcagtttgggaagctgtagctgcccacagagggaggttgagggggcaatgctcctgcctgccccatggagcagaagtcctgggtttgcagccttgacttgggtggctgcagcttcactgagaagggtggggctcctgcctgctcctggtttccccaagagcatagggaggcctaggtctgcagccacgacttgggaagctgcagctgtgcctggaagggcagggttccctcctgctcctgggcagagaagacagtgatgcccctgaagctgtggcttgggcagctgcagggcacctggggagctcctgctccaactcagaaggggcagggctcctgcttgtccctggttccatggagtatgcagccccagccatgcctccctgctgtgatagtagtggccactccagatggcccgctgctgccatcacttttgttaagctatatgagcagtgccattgagtatttgcaacctctgtagccattcatggcataacccaagacttttcagacatcaggagaagcatatacatttgtatgagtcagattgagacaaagttgtactgatttctatgtttgtacacagacaaggatgaagaatctatgttgggaagctgctattgatgtatgtattgcagaaattttcaggacaggccatattcacaggagttttactatttcaaggaatgtggaagaagatgacaaaccaagagcagattggatagccagctgcagctgccgcttggctccagcagaccatataattgtcttgctaggctgtggtgcttgacctagaatacaaagagtgaattaattctccactcctccacctcccggtctaagattttcccttcctaggtgccagtgttgttgctctttgtccaccatcacaaaatcggttcatcccattctagtagctataactttgccttttttttgtagtcagttcctagtcacaccaaaatcatttgcctagaacaaatagaaagaggaacaggcatttgtatgacatttacagagattcatcataattaccaccttggccttcctggaaaactgaacgggaacttgtaaagctgtgcactcaaataaatgctggttatcctcatgatgtaaaatcatgtttaaccaagaaaagaatataggtggctgaactggaattcaatattaataccattctgacaatgttgctgcctggagagtgtaccaaccaggctgttctaaggtcgctgttcggagaaagaaagaagcatcatgcctttcacttctagaatgttagaggaggtgtactttttcctattactgttagatacagctaaaaattctggacattatagatgttccttgaattgaaatgagattacttcccagtaaactgattgtagtttaaaataccataggtataaaatgcatttaatacatcttatatactggacatcataagatttcctatcctatgttaatcatgctcagaacacttacattagcctatggttgggcaaaatcatctaacacaaagcctattttataacaaagtgttgagtatctcatctagtttattgaataaagtacccaaagggaataatagaaaggttgtattggtacacaaagtacagtttgttctgattgggtattgcttttgcaccatgaaaaaaatcataagtcaagtcatcattaagttagggaccatttgtatataaaatcaaaagataaaaagtttctaaaagatagagagaaaaagccagattgtctaagaaatttaggacctgaacaatgctagaacagtgagtttcatgagtttccttttgcctcatacaaaccagtggcatccaggagtagccagtaacctggtaatgccggtgggtacagaaaagaaatcccaaagaaatgccgttttctgtagccaaaggaccagggaaaggattgactatgaaggcagaaactataagaccataaccattctactctagccaaagaccacaaaaagttttatagcaaccaagcatacatttaatcaacaaaaagttaactgcaacgtagcaggagagatttgtgatagtgtaactttcttttgctccatctttccatcactggcttgaaaatagtctttaaatggcatccggcattcccagtgtgggtgtctggggctggaggaagcagagtagacccgttatcaaagaatagtgcctgactatgttgacctgtcaggtggttttctgaagggctaattcaaagggctttcctgtattcatataactcaaaaccctctcagagtggagaagaagtggctatgcagaggaaattttaaaaaaaaattgataaagggactcagtagcaggaaggagaaagaatctgcaaatgtgaagataggccaattgaaattattcagtctaagaagcggaagggaaaaaaattgaagagagcttaatagacctgcgggacattataaaaagtacagccataaggataacaggatttccagagtgagaggaaaggaaaaagcagggagaatatttgtaaaaatcatgactccaagcttcccaaatttgttggaagacatgaacctatacatccaagaagttcaacaaagaccaagtagaaaaaaggcaaaaaaaaaaaaaaaatctcattgggacacattataatcaaactgtttaaagaaaaagacaaatggagaatcttgaaagctgcaagagataagtgattaatcacatggaagagatcttccaaagattagcagtctattgtttatcagaaaccatagaagccagaaggcagtgggatggcatatttaaagtgtttaaagaaaaaaaaatgtcaaccaactattttgtatcaggcaaaactattgttctaaaacaaaggagaaattaagacagttccagataaacaaaaactcagagtattcatcacttgcagatttgccctacaagaaaatctaaagggaatctttcaggcagaaaagaaatggcactagacagcaacttggagccatgcaaaaataatgaacaatggtaaaggtagttacatagataagaataaagccaatatttttgtagtttttgtttgtaactcccattttttccctaacttatttaacaaactaatacataaacaataattataattatattgtggaaaattatacagaataatctcattgtgtataatgagaacacaatgagtcaaagtgtgtttttccatgtgtataaaaatttcctttgttcgccgttgtaatttttaacagcacaacttatgtatttcaaatagacacaaaattagtagcatttacagtagtatcttaagctaaattgcctttgaatgagatcttgctttcaatactttgatgtccacaaggcatatctagaaaattttatgctttggaagatgaagactgcttaatccagcggggaaggggactatgatttctctttgactagttgccataacactgtccttaaggcatatgaaggacttttatatgttatttagacatcagtaggcacagaagctttgcagtacaactttgacatataaattctgtcattttttttttactttaaaataaattttttttttaaatgtcactttgctagcattgataacgctcttaggtccaccacaacattatatctattcacccatactatttttgttacaaatgttaaaaaggtgatttcttcctgaaaggactgtgcttcaggtccccattcaattttagatgttatatttgttttttataaattttccaagaatgtagtggctgcattcttgggttgctgtcactcttcctttggtttttacacttactgagaagtggctgttgtaatttctgtcatgtgcaatgtattcctggaaaaagggatttcaatatcagcatgttattcttcattctatttcctatgcagttgttggtgggaatgggaagggcctgccaggccatcattgatgtatactgattacaaggctcttgagtagaaaagagcctgcatcattgccggcctacagccaccagcttcttcaaggacacagagcagattatggactagaggaggaacagtggttgttgtgcttgttactctgtagacccagttaagtttcttgcatagttaaccctccatagatctggtttgctttttaggttaggatgaaaaggcaaagagaaagaccaaattcataaattttggagatttattcctagatataaacttaaaacaagaaaagaaataagaggaattagacaaatgaacagacatataaaagtctagatagtgaaggtaggtccatctcttttgcaacagcccaaacaaatactgttttgacatgacatgcacatgtcattggtgtaagacagaatgacgaattccaagctccagtccttggctttgttaaaaaatgttgcccaggctgtgagctcaaatcatatttctttatctagattttaggtcattctattttgaaagaattcttttgaattataggaaatttctttaaaaattggagataacagaatgctatggggatgtatggcctgacatagagaagagctacgtaatgtgaaatgctccttaaattgcaagaatctcactcaaagttttggaatagaatgcttcatgactgattgttgtgtgcaggaaagtggctattagaaataattcctcttactcatacaagagttgccatttgatatcaaacacatgcatgcataaacatcccccacagacattgacttggagcatttgcttctcaaatttttaatttaactaatatgtcagatttttacatttacctgttcacataatacaggtctacatcttgagtacgtctttgattactatcatgattccacaagatggcagtgtgttcttagggaccctgaggaaagctctcaagtgctcgtgtgtatgtgtgtgtgtgtgtgtgtgtgtgtgtgtgtgtgtgtgtgtgtgtgtgcttgagagagagagaaggagagaaagagagagaatgggaagggcgataagaggaggggttagtgatataccaggggttgtgaaaataaccttttttttctaattggtaggacagattctttttatgattcctaaagtggaagaaataaagtatctctgctatgttcatttctttttggattgaaaattttaatcctcagtgaaccagggcagaaaagaatgatgatatccttgagagttttactggtgatcctgtggcttcagttaagctgtgagttgggcatctctataggaacataatgtacaatattttgagatattgtctatcctaggctgggggctagaagcctgaattttttctctaactaagagagtagaaagcctgtaaaaacatgatttgaattctggggagtaagcatttacctcccaatttgtcttctctgtctgaccactgtctttttcacaggggtttggagccaacggaaggaggtggagcaggatcctggacccttcaatgttccagagggagccactgtcgctttcaactgtacttacagcaacagtgcttctcagtctttcttctggtacagacaggattgcaggaaagaacctaagttgctgatgtccgtatactccagtggtaatgaagatggaaggtttacagcacagctcaatagagccagccagtatatttccctgctcatcagagactccaagctcagtgattcagccacctacctctgtgtggtgaacacacagtgctccccagacacctgcagtctgtacccaaacctgctgggccccaggaatgcctgatgtagagcttagactgcagggcagtaaagtcctctttgctctctagattcaagtggaaattaagagtactagtatggaggactgattgattagggaagtattattataattctgaaaataattgagaccctgaagaaaaatgaaagatacagtcttggtctggttaaaatattttccagtattctctttctactttagttttaaaatattttttatatttcttctggagagattaaaaaaataaatttttttgagatcattgacaaaccagaaggattacatattcatttcatacatacatcacaatctatgccataagcatatccatcatctctaaaagtttacttcctccctccttttttaaaaaatttaggtatgattgatatacagcaaggtgcctatatcacataatgtatacattttaatgctcactctagttttatgccacatctatgctttattagatcggttttatgattccttttatttatatcaagaaaacattttcatacaataacagatattctgtctctgtctgtaggacatcttattctttccccatttagttacccaagaagtttgatagacgttgctttaggaatgcaacagaaaaacacaaatgcaaaataaaaaagatcagcaaactactgtgaaaatcctgtaagtcataaattcttttagttatagaaccctcaccccatctccagccttagctgcagctccactcctgagttatataagggcacatttgatgagtagatggcagaactagagggagagggtgagaacacgttaaaaaaaagcctagatatttgcagagattgaagattagagagggtctatattgccattttggggtaaagtctgaattgaactcaaaaccttgtggaagagtatattgattcctatgtaactgagtgtggcttggagatggtagggagtcttagctctagtcacagcatgtcatatacccacagcacctgctggaatgacttaaaatttattgagaaggatctctaagtatctaaaagaagtctagacaccaagaggctttgttgtgatgaacaaagacctgtttaaatcagtgaccagagaccgtatggtattgagcatatttcagcaaatgttggaggagagttggaaacactgaagagcatataaatgcctccctcctctgactacctagcaatacatatttgccctgcaatatatactatgttcgggcaaaatatttgtgcctgatgaaaagaatactttttagtagctattaagttgaattacaggaaaaaactttgaacatcactttattataaaagtgaagttgtagtctgttggacatgatatagtttatgtagtcctcaaagtgggaaagtttagaaatggagagttaagatttctgtcaagggttgttcccatagtcactgatgaaaaggatgaactcaatccaaatttgcttcaaattcttaatctgaagaatgaaagactgaataaatctttccaagccttggaagaaagatttgaaaggcagtaaggaagagcagaaagttgcgccagaatcaagacccttaaattttacttccacatttgttttataccttttggcttcctggcattctggaaagaacctgggttgtgttttctgtttgaatatttatgttactaatggtccatttattaggctacatactatatatatttcaggatttgtttcagtattaaatgagataacatactgctttgggatgagttccttaaaagtagagactgcagttggaatctttctctgtaattgattgaggaaaccaggttgagacagggggaaaggctaagcatggacttggtccagtgggagtcttgatcccacctgacctcatagggagctctggagagtgaactacatcacaggggtgatccctcccacgctgaggcaagggagccagactgctctgacctattgtgggtaagaataaagtcataattggctgcagtgtttcttggggtagaggtatatgctactggacaatggtggctctcattggcagaggtcaactttctagggaaaggggcaaatgtgagccaagagtagccaacactcacagtagcgggggatggctacactgtcctgggaaaggagatctaggctgggggccagcagtgttcgttattaccagggaacttgcctggtatgtgggcagcattcaagaaataataaactttaatcatattctgaattttaatttcactctccttttgaagatgtttatacagctggccttaccaattttgaggagttgaaataatgtaagttaaagcacttgttaacagaaaccatctaagtaaacataaaaagcagatgaaaggaaaaattttttcaaagctaaaattcagaaatttttaaaagagtagtgaccagagaaccagtctactatcttagttgcttttgggaatgatgagataacattctatccatcactttctatccaggtagcaatgattctgatgatttacagttcataactctgggcttctatgtgtagacagagataccatctatatttatacatgattaatgctattttgttattaatttgtatttaagaatgaaggactgggtagcaggatggactccttatgtctttgtgtccatgttccccacaaagtttcttcttgaatggggtgcctggccagtagtgtgggtatgtgggtctgtcatgtgaattgacaggcttctttctaggatgaatgaggagggaactggtaattaaggtgcttctctttgttccctgaacctaatatcattggaaatggcctaattatattaattactcgtaataaaaactgaaaccatcccagatggctcaagtaaactctcatgaagattacatgccccaagttggcttcatatgcttctcacacacaaatacagaagcaggttggtgagaacagagagaggctagtgcagccattccacatgtggaccttcactacgttctcttgtgttcttttcctctcacccttcatcacctgctctctttctcagcccagaacctctccagggtcccacccagtaggttcccttcactcacgtttccactgtaatcttctcacagttcattctggcctggactttttccctctctgttttctccatcagtgtatttgcatccactttttatctacctcatgggaattgtgataactttcatctttttattagttttattattgatggattcaggtcattctgtttataattttacatttcatttcagtgggaattttagagagttaagaggacagcacatatgtttagtttgaagttttgtttcagaaccccaccctagtaacatttaaatttttaagctgactatataattttgtcttacatgtgataaaaaatttataggcagaatcaagaactagatcagaagcccaagggaaaactgatttcaggctggtacaattcaatggagtattcagaaagcagtttttgttctgaccttgtaaaatcccattttacctgagatttttctccttactgggttatttcatttttaggatccaatgatctctatgctacaatagattgggtggggaaggctttttgctcaaaagcttcattttattattggggcacagagcagtctgttcttgttcgctattgtctcccacccacatggcactgctgtttgctttgctctgttgagcgtcaccgtcaatatctctcaccatttctacacctctcacaggttcctctcatttctggtctgctgcttgcactccttccacctgtattgagttcatgtaggtttactttttaaaaatctctttaactattttgataatcacttatttatatgttatattttcttccatttatcattctgttcaagtttctttatagatggagaaacttaattgtggagatagaaaaactgcattaattttttttagtgtcagattctcataatttggcacaatatatcagtctattctgaacactgacagttggaatagtactctcactttctctttttaaatataagttatctaaattattttctcctaggttcacaaatattaaacttgttgacctgaaattaggaagtcttttccacactttccacttgacaaagaaaattcttgcctttaatcgtttgctttgattaattaatgatatgtgatccaggctgactttaagtatgagtctctgatctaatttattttttaaagagtcaactaaaggaataatctctttcacccactgtaatgctcacatccagctgcacagggccatatgaagctcagcccagactgagacaactgatcaccacccctcttcttgatgaacgactttactaatatagagtgtctcaatggttttccaaagtctacaacgttgtcttctgtgactaatttctcagggaagtaaattactcttctatttctacataattctcatttctcatgtatttaaaattaaaaccatatactctacggaagatgacgtcatcacagattcgggaagaaagaaacactttctgttggttttgatatcacatctctcaaatgagaaggaaacagttcacttccttggatctgtggttccacctgtgccctccagggggcgacgttgcactaaggaggcatctgtgttcattgccgaccatcctcatccactgagcctcctccctgcagctggctgatgtagctcactgatgtctgtgtagacagggagctgtgacgagagcaagaggtcagaacacatccagactccttaagagaaagcctttctgttttggaaacttttcaaagccagggacttgtccagcccaacctccccattgctcctagctcctgaggctcaggacccctggcttctgtcctccctgctcagggtcctgcagcgttgcctctgctcagccatgctcctgctgctcgtcccagtgctcgaggtgatttttactctgggtgagtaacattccattctttttcctccttttgtaaatgtgactgtgttgtaattgcctctaagtagacttcttagcgaagtcagcgctgcttttgcttacacagcattggtgttgcaggaggaaccagagcccagtcggtgacccagcttgacagccacgtctctgtctctgaaggaaccccggtgctgctgaggtgcaactactcatcttcttattcaccatctctcttctggtatgtgcaacaccccaacaaaggactccagcttctcctgaagtacacatcagcggccaccctggttaaaggcatcaacggttttgaggctgaatttaagaagagtgaaacctccttccacctgacgaaaccctcagcccatatgagcgacgcggctgagtacttctgtgttgtgagtgacacagtgcttgagactgcaggagagctgaacacaagcctcctgagatgctgagactttctgtgactcaagaactcgaccttgaagtctgttttataatattaaatagcaattccaagtttctgatgcttattgatgtgtgctgtatctttttcatctatttatttttaaactatctatgactttaaatttaaagtgtgtttcctttaggtagctttatatataaggtctttctatccactatgtcaatctctggttttgcactggcaagtttagataattataatttaatgtatattgatgaaattggattttagtatactatgttattattgtgtttctgttcctcccttattttttgttgttctttttttttgctgacactttttggattatttgaatatttttaacactattttaatctatggacttctttggttatatttccatattttttgagtggttgctctggagattataatacatatgactaactctccagggtcttctgtgatgttgtacctctttatgtaaaatgtagaaatttttgtataatatgtctctttattatacaataataattgtctcttcaacaaacactgaagtttgttgtagtcgttcatgtatatcgaagctacctatattggaaagctcaccatataatggtacaatttttgttttaaataattgtatggaccgtataaagctcactaggaataataatatttcgtgtttaacagctatttactaactctggtatccttcctttgtttctaaagtaagttttcctctgacaccaggagatgtgtttgaactgatgtcattcccttcaaacttaaaaaactccctttaacattttttctagagtaggtttgctggtaatggtattttttagtcatttgttatctgaagatgtctttattcttaatttgccctttatttgtggaagatatttttactgggtctgtaattctgtgccaaccattttcccccctcactttaaagatactgtttcattgtctgctggtctccatgttctggttagaaatctatggtcattcaagtaattgttccccaatgatattaatatgttgtttttctctagctgcttcatatatatgctatttgtacacacacatacacgcaagtaaaatcatatcatcttttgttgtcctcagtataattatgatgtttacatgtggttccctttaatttgttcctgtttggggcttaaattcataagtttgtctttctttgaatttggtaagtttttggccattcttctttcaaatatgttttctggcgcaatctctttctcttctccttctaggactccaattagttacaacttagactttaggacactttcccactagctctccatagctctattttgttttctttcaatttttttcttgattttaaggtctgcctctactcactagatgcctgtagcattacataccccatgttgtgacacccaaatttctatctagatttgtcaaatgtctcctgaggggagcaaagtcaaaattagttaggttagataacctatactggtctattttcaagtttgttattcttttctctatcactttcattttgctattgagcccttactgtgacattttgattttggatattgtatttctcagttctaaaatctccttttttttttttttttttgagacggagtcttgccctgtcacccaggctggagtgcaatggcatgatctcggctcagtgcaacctccgcttcccgggttcaagccattttcctgtctcagcctcttgagtacctgggattacagttgcgtgccaccacccctgggttttctttttttttttggtatctttagtacagatggggtttcaacgcgttggccaggctggtcttgaactcttggcctcgtgatgcgcctgcctcggcctcccagagtgctgggattacccatgagccaccatgcctgggctaaattttcccttttttaactttgtggtacataatcaaagagctactttaacgtctttttctattacttctagcattttagtcatcttgacctttcatctgttgatcttttacttaaatattagtccacttttctgatcctttgtatgtccaataattttgaaatgcatattaaacattttaaatattaagggtgtagactctgttttcttcttctccttctcatccttattcttctttacaaagcattcctctgaagaattttgatgcttttgctttagcaggaaatcaacctagtttggttcatactgtaaattttctcctcccttttgtggaatttggtagctcaaaatctcagttcagttctctaatcatttgcaatgttggtttggatttatccaagtcatgtgtagcttagggattagtgtgaaacctgtttgggtggctcaaatatcaggtcagccctgagctctctgctacattggtttttttgtcctgcattggtgccactcaggaggtagtctgagactgaaatagtggttcaaatatcagttgaataacccaagctttgttgatctggtttgagtcagtcccaggtacatggagctttgggattagcctgagacttgagctgttttccatttcttccttggggtctgtcttttctagcctggtccacagaggcagaaagattgtgtctctttctgcacaatcttttggtctcctgcacaatcttccgcacctcttttggtctcctataccattgttattgccaccctaccatacaccaggggcctttctaagggcaaagacaagagagaaaaacaggaaaaaatatgaaataaaaggcttgcacaagttgcttctccaacgtttgattttgtctgctttgagtaatttcagaggccacagatagttatttttttgtgtgttttgttcagttttcacttgtaacctgtaggagagatgggctgtaggcgtcttaaagctgtctcctattttactatgttcctgcattaacttatggtctaccataatatgcatcaagaattgctatttgatattttcttttcccacttttattttttattacttctttcagtcaatcttattcattttttatatatgtacttttttttttgtcattaggattataagaatcatctaattacggtcttgattctttggatcttttttctccaaactcacgaaagtctttctttgatgctagaaaatgagcctgtgcacttgtttttaatatgagcttaaagaactattttccccaaaatataaaatcttctggattctgaacaatatctgaacccaagagcataataaggtgtgatacgactatccaaagactatgcttttccagtacctaaagcagagctattttattttcaattttctgctctctctgtgtttttcatttctgaattttcacttattttaaatggaccatgcattttgtgatttatttatttatttatttatttatttatttatttttttgagatgaagtcttgctctgtcgctcgggctggagtgtagtggtgcgatctcggctcactgtaacctctgcaccccaggttcaagcaattctcttgcttcagtctccctatactagctgggattacagacatgcactaccacgcccagctaatttttgtatttttagtagagatgggattttgccaagttggtcaggctggtctggaactcctgaccttgggtgatgcacctgcctcggcctcctaaagtgctgggattacaggtgtgagccactgcgtccagcctggaccatgcattttggtattttggggtgtgtttggagactattcaatctccctgacaatcaatgtatttcttcaaatgctgtcaacatcctccgatgagagcattctatttctgatcctattcctcttcaactatgagatgttgcctctaaatcaatagagaattgagaaattcctttgcattcttttagtgcagagcaaaaggcagtattccaaggcatcatacaatcctgtctttttcactttgaacacactgggatttgcaaacacccagcaactttgagagacattaaaatcatcaccagcctgaaagtcagcagaaattgctcctcatagtttattttgactatgtttttcctgccctgactttaaacttcactgtgatcccatctacttttgtcttatggaaacatggataaatctattctttccagatgatctttgtttttactcttttggattttggtttgttctcatttatatttctatttttttagttaggaagaaatttggtagatatgggatgtgagtatatagcattaggaatctaaagtccacactcaaagtctatgtatttacaaaatgtcagccatactctttctacacaaaaaacaatctgtacaggcagtaacaaatgaatcaagaacccaaggagagaactggccacatgctcctggaatcaaagaaaataagtattctgactctgtaaaagattctcattggccacagagaacctgtcgaatttctcctttctcttgttttcagagattgcttgtttggtgttggtgtatttccttcagccctagaggtttctgtagttgcgtttaccttagctctaggggcaaagcctttccatcctgtgttacaccttgtcattagtcatatagaggcactactcccattttaagggtcccgtcttttactctatggccgcacaagcatcttccaagggaaatatctctatcatcctccaccaccaacaaggcaactctgaaccatcaaaaactcatcccgaagcagctagtctgcgtccaacgattctcagaaacacagcttaattctgatatatttttaaaacctgatttctcaatgaggtaacgtattactctatttttacatgacatcttattgctaatggactataggcctaaaacaccgtcatagacttgggcaggaagaaacacatggtgtggatgttttgatacatctcagaaattaggagaaacacactaatgagctctctctgctaaactggttctgcacttggcctccagagggcgatgctgcacacactggagcttttgtttctgttgaagatcaatccactgctcagtttcttcttcctgcagctggttgagttctttccagacaaagacaagtgacaagaattagaggtttaaaaagcaaccagattcatctcagcagcttttgtagttttaaataagcaaggagtttctccagcgaaacttcctcacacctcttggtcttggtctcttcagacactttccttcctgttctctggagatcttgcagaaaagagcctgcagtgtttcccttgttcagccatgctcctggagcttatcccactgctggggatacattttgtcctgagtgagtaaaatttctttatggtctctagttccacaggttctgactagaaatgcttgctttttatactgagtctgcactgctttcactgatagtacattgtttttccaggaactgccagagcccagtcagtgacccagcctgacatccacatcactgtctctgaaggagcctcactggagttgagatgtaactattcctatggggcaacaccttatctcttctggtatgtccagtcccccggccaaggcctccagctgctcctgaagtacttttcaggagacactctggttcaaggcattaaaggctttgaggctgaatttaagaggagtcaatcttccttcaatctgaggaaaccctctgtgcattggagtgatgctgctgagtacttctgtgctgtgggtgccacagtgcctgggtctgcagggggagctgaacacaaactgcctatgctagagaagttttcagagtttcagtatatctccctgtggtgttttcaaagatctccttttttatgatggcgaatgaggcaaagagggctaagccgacccaggcatttctatgtaattctgcagttcctgttatgctccatgtcctgataaattttgtttcagaagctttttgctcattgtagaaactatataataggaaatagtattcttgaatgatggaagagatagtattcttataacaatcaagtcctccatgacttaccttgatgttgtctgcattagggggttgaccatgtgagctgtgacatggcctcagagaaaattggttttcatttataatttcatctgtcatctaatctggaaaatagaagatgattttctcatgtttttaccttgcaaatttgttttcaagttggtcattcataggttattttttttagagtttctttttttgcctctaactgtggtatttatgtgtctaaatattttgtctgagtttaaataactctatttaggaagaactgtgagaagttattagtcaacaataaaagagtcattagaatcatgaaggacttagaaaaatgtcaggtgatgttagttccgacaactatttaagaatagtgcagaagaaaaatgaagattaaaaattcatcagtgtttctccaaatactttttcaccgtgagaaaagtagtttcctattcttttagtctcagaaatgctgcaaatctgtatcagaaatttgtggctataatccctttcatttttcttctagctactggcatttctattcattgctttcgccctgttgttatatgatttcagctattggaatattaaagatggattcttataacattttgataatcaatcatgtgataagtttagcaatgccaaactgtgctggaaacactgataagaattacaatgcatggtagagagtcactggacccagtataaatttatgactttcttttgtctaggatggaaagaactgttgaagaagcttttatacttcttgtttgcttgaagccttggagggtagcaagtagtctggagaaaaaggagaaggaggatgaatctttccagctgctacttggctcacgctataatgtattagagggtaggtacgtaggaaccctcaaatatagagagaataagaaaattgtggccaatggtacacgttagccaaatggtgaaccagcagatcagcagtagtttttaggacctagtgagatgattatatgggatagatgtatttcaatgattgctggatgggtataaggaaggtaaatggaacattatagatgtaaaattatgaataagatatgtactcgtgtaatgtcccctgcctcagtccctccattcttttctatttctaaagcacactgtcttctacctttgataagatggctaacttcaggtgactcactgttatcagctcagccacattgcccacagggactgtgatgggcactttatgcgaatcttaaaggaggtaggaacatagaattgttttgttgttgtatgtgtttcaaatgtatgtagaaagttgtatatagaagtcgaatagtccaaggggtggattgatttattgactctcagctccaaattcaccccttgcctcttccgtgaatgtggatctgtacccttcaactatgttccttgccagttggcataacgttatgctttgccagtagaggatcagggagaaaagattttgatttttgctttctgtgtgcacatgccacaggttcctgcagcatgagaggcttctccagcgtccggctcctgcagtgcacccacaccaggttcctgtgctgtacagtggccagcagtgtcctccagcacttccatttttgcgtggtactgcagaacagagcctgcagtgagacaccttcctgtatccagctttccccatattcatccctagattcatgaatcggcaccctagattatggttttctggtaagtatgagagggtgaatttctctgtagaaaattcacagcacaacagtgacttctgtgtcatctagtgagacacagttgtgcctttcccaataagatctgggtctcacccctggggggtggggctaggggtcccttcttggggtgttgtacccagccctaggagtagggactgcaccttatatctgctattcctacaggaataggaatagcagagttttcttttctttgtattacctatttccttgttactctaaatcctgttataattaataattttttatattaatattaaattttcctataattataaaaagcattttctgttcaaattattatatggtctatctttcctgattggaccagatttatacatgcaccaaggatctcaagccactgaagagcatctccccacccagtcacctgacaaatctagttgcttgcttgttttatttattgctcatttgttttatttatttatggtttattattttacttatttattgttttacttatatgattacaagaaactttatgcaataaagaattacattaagaagaatttggaaatatgtttttatattaatgaaattaattttgatttttcacattttgtgcatgtttgacacaaaattttattataccattgaggcaaattataattccttttaaatgtattttagcttacaacacaaattgtctttcattcactaatgagactgtgtctgaagattttaaattccaagtcatttttcattcatctaactctgttaattatccttatttttgatttctttaaaatggagggaaaagaccatgataactttaaaacaatctgaagacagaatacttctaacacccagaaagtttttgtgtgtgcctttccagtcaacccaccttctggaggcaacagatgttcatatttctagtattacagagactttaaccgttttaaaacttcgaatcaatgggattattcagtaggaactctcttctgcctggtttctttcactcgtcatgttctggaggttaatccgtgttcattaccgtaattgttgagaagtttcctattatatgaataaagcacaatttatttattcatttggctgtgcacaccattggctgattacagaatcttttagggattaaagctttggtagcattcttttttttttaattagattcaggggttacatgagcaagtttgttacatgggttcactgcgtgatgttgaggtttgggcttctaatgatcttgtagtgaacgtagtaacctatagatagttttgcaacactttaccctccccccatctcctcccttttggaatccccagtgcttattgttctcatctttgtgtccttgtgtactcaatgtttaactcccacttataagtgagaacattgtgtatttggttttctgtttctgtgttaattcccttaggataatggcctccagcttcatccatgttgctgcaaaggacatgatctcatgctttttatggctgtgtagtattttgtggtgtacatttaccacattttcttcatccagtccaccactggttggaatttggtagcattcttggtgcaaggtataggctgtcctagatttttatatgccgttcaggcaatggtagggtgtgtctctgaagttctatagttgaaatccatatcttaaatacttttatttaaaaaccaattcctaaatttcattatgctatttaacatgtcactaatttttctaataaaaacccaatatctgatatttcctgtgctacttataaaagcttcaggtatcattcaagctgtgggtagctgaactgtagtttcctctgttgtggccttacgtgttgataacaacagtagctgaccgccttggagtttgctttcttgactaagtgaattgactctccttagagttgagacttaagttaaccagctcatgcttgatattctgtggtttctgttgaaaagatttaatgtaaattatataacctagcactttagtatatttattcttacttggtaacatatatatatatatatatataaaatgaacaatattttgataagtgttcctgcaaatcctgaagatctataagtcatgtaattataatccttgctcaacagtcattccagagaactcatttaatatttagaggcattttgctatatacagtacatatgaaaatattttaaagcttgttaggtaacttataaaggaaatttcgctgttatttaatatcacatatgcagcacatccaatacaaatttccaatcgtttaagcacaataataaagttgtcaagataattagaggtctgtacagaattctcatggggatatctaagacaagggagcacttttattcaggaaacaagtgcaccaaaacatgagtgtaaaaggtagaatgttaagatgctgaagatactttatatgtatatttatgacttcaagttgctctgtgtgatatatttcatataactggatattaaaaatttaccttcacattaattttctagagctgccatgacaaataccacagacggggtggcataagcaacagaatctgtttttctctcaattctggagatagaaatccaagattaaggcattggcagggcaggttgttattgaggcttgcagatggttgccttctcaccgtgccttcaggtggtctctcctctcatggtgcacatgtctgtatctggatttcctttcttacaagaacaccaattatgttgagttagagcccagctatataacctcattttaccttaatgacctctttaaagatcctgttttcaaatacagtttcattctgatgtactggggataagggcttcaacatgtaaattttggatgagacacggtttattctgtggcaaccctccagggaaataaatatcaaattaatgaagaagacaattaaagcctctcttgacacaacactttgctaattgctggcgcacacaatgatcatatataattttgatgatgaattttccctgctttcttttgtgattctagagcaattagaaatgtgcaataacagatgcagatacttcctaaatatttcaaattgtaaaggaagtagagagtacaatgataaaaatgtaaaagctattatttagacttgccttctttctctctgctacattaggatatggaattttctcatgttaggtttgtccttttctgcagctaaatcttaatttctttttggttttccatctcagatagttttcctttctttctctactcttttctgtatgaatgttgagttttttaccttgtcttttttttcctctctcttgtctctgatctcaactttgccagagctattttagcagactaacttgctattcttatcttgcactactcttttactacctaatcagcagaagtgacatttaaaagaagcgaaaaggattgaaattcttttggaagttgtttatggcaggtgcagtgggttaagtagatgagggaggggtgctatagtccttgaatacagaggcagcaggaagaatcccatcctatatgctcagctttcttggggcttgttgtctgttttttcaagcagtatgtggcaagatttttaattttgattgaatcatagtctttttaaaaatatgtttcgattactgatacatttggattcattttaacattttggctctgctcagcatgctcttgatttgttctttcgtgttttagtctgtcttctgttgcagtgatagttttcttttttctttctattgttttagaaagtgtaaattgtattttttgttcctaaaagtatccttatattatatatgtatacatatatataatttttaaatacccaaagttgttattattttttcctgaagttattccgtaacattttttccttgtatgtccccctctttctccttgggtatatttttttctccttttgacttactgtctttagaattacttctgtagctaattggaagaaactatacacatactatatatatgaagacagtaattttagagtttatcaaattagccaataaactagagctccaatgcacactaacaaaagtaataaaaaagaaaaccattcaacacaataatgggaacatgaattcattcccttcttcctcagagcctttgcccgatcttccctctgcccggagtgcttttcactactagccacactgatggttctttcactagttcctagtctctgctcctgaagaaacatgagcacatgtgaataaaaagaggaattctttaaaagctttattgccattttacattttatggttaaaaaacaacattttaagtgttgatcaataggagaaaggctgtataaactgaagtatatccctaatatgatgcagtatagcagaaggccccatatgaattaatacaataagacctaaagatttattattgagtttataaagtgagttacaaaaaggtatgcacaagatgtatcatttttattacgttttaaacctataaatgaaatgccgtatatttcagctgtttcatatattttgtatatggatgtagatagagcatcaactccaaattgattagatgaaacaataaaggtaataagggatgaacggactagaactgggagtagtggtcgaaggagattttagtctatctggaatgctgtattactttaaattatttcatatatttgtgaattctttctagtattaaaccaaaaaaagtcataaaagccatcacaaaggtttatctacattttttccttgtctactcatagaaaaagggagagaggagaaaacgatcaccttcttcattagcttttgttcagccttcctacgtattttttttctgcctctgggatcatacagcttctagtttacactcctcttaggttcctactatgtgatttatattatagatatgtatttttgtccactccagtagaccataaaactaatattacatctgcttttaagtattcttaaaacctaataaattattcacttagagtaaaactttaatacatgtttttggacttactttgaactaaattaaaggaattaagtgaagagtacaaaaagggaattgccaaattaagatactgatttccacgaaatgacattttaaagtggtaattggttcattcttaatccccatccaatctaggcagttgtattgttttctgaccacctccatttccttcataggaaacagtaaatggggctgtgtgtgtgactactgaggaattagttggtccgtagtggtttttgttgatgggttcagtccactagggggcactctaggatttccagaaatgaagactttttctgatggtcccaaagggtggaacaattaaaagagaagacaagggggcatgtgagtcagtcaaatcacagataacaaggaattgcagtggaatggggggcagtgtgtgtgtaaagttcatcttcggttttcagctctgacattctatatagaacctcagaaagctggagttcataggtctacgaatccattgtgaggatgattctataagcagaggtaagggaattggagttttactgggaattgggaggatggacactcaatagaaaacatctctattacatattttcagtttttaaatttttatgactaaaattcctgaaattcactggcatggaaattattccaaaatacccctgatatctgatttcttcatatatcttctctgagaccaaaaggaacaagaataagcagaaaagaaaaaaataggaaggaaataaggaccaaaaccagaaagagaatagagaggagaatatttaatttggccagcagtatgtggtctgatcgtaacagctgtgtgggcctgcagggtgtgtagggaaagggttggacagagtgggagaggtagaaattaaatcagggtggatatcatacacacatcctatttttcttttaaccaaacaaactctagttggaaacattttctatgcagacaatctcctgatttcaagaaattgtatttatttctaaatccaccatacatgctaccagaaagttttccttattaaaattttcatataattgaattttgcaattttctgtccagctatgtaatttgggcttcccatgattctttaaggctctactttccccagctgagacacggattcttctcagacgtatcatcctctttcttcacatactattctacaatttctcttatataaagtactttaaggaaaaaaaaaccctgtaacttcatacactggaaatattgactcttccccccttgcactattcacacccagagttttggagagattactgtgcggtctcaaaggccactgctggtggagtttcctattcagatgaatgacagagctcaggtgtgattggtgctcagggagtctggtgcaaactattgactgtaagaacaagtttgtctggacccaagacttgaccccttccagagcagcggcaaaggcaccccagcaaccaggcaaggagccatggagaggagactgggagctctcttggggcttttgtgggtccaggtttgctatgagttgggccgtcctagatgggggctgacaggggaagggagggaagggagagctgacacaaatctcctggactgtcctacagcctcataagtgtttctagggatattttacaggcttggaaactgcatcagtgattccttagtgacataatacatatttgcttttctctttccaagcaggggtgagacgagtgaaggtggagcagagtccttcagttccgagtctccaggagagaaccagctctactctgagatgcagtttttctacctctgtgaacaacgtgcagtggttccaacagaatcctgggttggcctcatcaatctgtttttcatggcttcatggatgaagcacagtggaaagttatggtcaaaaagaaactgaggagctctgtggtaccctacacatcacagccgcccaactgaaagactcaggcacgtacttctgtgcagttgaggcacagttctcccaggaaatctgcagcctggatccgaactgcagctgggcctgcagccccaaccccttccgtgagagaggcatgttgcccccacagtatcacttgcacagcttcgggttttctgattgacgttgcgcttttatctctgctaaaattagacacttcaggattgccatttaacttttttatcctacccttttgctctcagaaatctctttgcaggaaaaagctttgatatggaactactggagcaacttttaaagatatcaggacccaatgtactgttaaaacagatcctctagcaaagagcatataaattacatataaattactgtgataaaaaagatttgaaaaaatatatcctggtcaagaaatagcaaagagcatataaattacatataaattactgtgataaaaaagatttgaaaaaatatatcctggtcaagaaatagcaaagagatgactcaatgtttcatccaaatgcatgttgttcacttttctagtaaaagggaagagagcatgtgtgatgtatattatatataattttttactcctggaacccataaaagataaaattttaaagcacgtaacgtcattggatgtcagacattctctgaatttacatatattatctgggtgctgacaatacctctttactctacacatgaataaactgaggattatagggcacacatgtcttgcctgagctcagatggttatgaaactagcaatgaagctgggctgggattctccttctcgatgtttgaaagcagagtgtgtactctaagctacacacaatagaagacccttgagaatcacaaaataccaattatttcaattgataaatttgtgcaatgtgctcacatacatcactggcaaatatatccgttgggataatttctaaattgcatctagtaagaaagagttcattaaacttttcattttgttacattaaaatccatttttcttccttgcattactcatgattttgtaacatcattcaaggtctcgaaaagagaacagaaacttctagggttgccccccaaaacttacctgctgtagccgcagtccaagacttctgagaagcaaagccaaagtttaaacctaaatgtggatcagttacaacacatgtagaatttcagccttacaaggtctgttatatgaacgtaagagaatggactaggaaggactggggccctgagaaccaagatgaagacaagctggcagtctccggtgaagctgggagcagggccagcttcctgggtatgtgatctgttgcagcccacaggaccctagttaatgctctgctatcactgccttgacatttttaatagttttgtttttaaacttgtgtgagtaaatgaagttcaatgagaggacagagcatgtaggtgagcagaggagatacacaggacagcaggacacaggacagaatcatatgcaggctcaggttcatgggcacagtgggcagcatgtgagccgagcagttggatgggctattttgagtgcatgagcacacagggctctctggtgttttgcggctctccaaagtgagtggcagtaaacttttcagtaaattattacacaataaaagcatatacatggacaaggcaataaggtatattggagagttattagaatccttcaaaaagtttagagactgtggttttgaaagttgatataacattacaatttggatatctgctggtttagaaatagaaattacatgtaaggatagcagcttaatggaaaagagcatcattttctcaccttttaatgctatcttcttttgtttttttccttaacatcttttttttcaacttttattttagaattgggggttcatttgcaggtttgttacaatagtatattatgtgatgctagagtttggagttataatgaatccattacccaggtagtgagcatagtactgaaaaggtgatttttttcaatctttaaccccctccctctgtcccctctcttgtattctccagggtctactgttctcatttctatgaccttgtgtgcctaatgtttagcccctacttataagtgagggcatgtcatatttggctttatgtttcagtgctagttcacttagttatcctaagttatcctaatggtttccagccacatccatggctgcatagtagtccatgttgtatatgtaccgtgttttccttatcaaatccactgctgatgggcacctgggttgattccatgtctttgctattgtgaatagtgctgtgatgaacatatgggcacacatgtcttttggtaggatggttcattatcctttgggtatgtagccagtagtgggattgctgggtggaatggtagttgaactctcagttctttgagaaatctccaaactgctctctatagttgctgaactgatttacattcccagcaacagtgtataagtgttgccttttctccacagcttcatcaacatctgctattttttttggctttttaacaaaagccaaacattgtggttttggtttgcatttctatgatgattagtgatgagcattttttttcatgtttccacttgtatgctttttttttttttttgagaagtatctgaagagcattattttcatgtgaagttttgaacagccacgttttaacatagaggataatattgaaattaattaactttttttttttttttgagacggagtctcactctgtcgcccaggctggagtgcagtggtgcgatctcagctgactgcaacctccgcctcctgggttcaagtgattctcctgcctcagcctcctgagtagctgggattacaggcccctgccaccatgcctggctaattttagtagagatggggtttcaccaagttggccaggctggtctcgaactcctgacccgtgatccgcctgcttcagcctcccaaagtgctgggattacaggcgtgacccaccgtgcctggcctgaaattaattttttaataattgaagatacagtgataaaattaataaacaaggattttgaattatatctatatcattaagccatttctagtttcttatacagcttccacaagttactaaaaatttcagaggaaacattaaaacagcactgtgtaaatttacattgaaaactgagttcagacgtacataaaactgatttgtggtaagaaataaattgttttagaaaaattgtttcacagggaccatcaaccactgatttactaaaatttatatttcagttaatccatcagataagtatgctaatgttgtcacagtatataaaatacttttaagagctccagtatcagttgcatcagcagaaatatccttctcgcagttagaaatgaaaaattctagttaagattttgcatttaataagagcacttgatattgctttcatttatatgcttgaaaatgaagttgctccaggcatgaattttgctaacctcataaattaatttgcagcaaagtgatccataaaattttattaatcaagatatcatattaaagtattattatattaatttatgacaccaaatttttaaaccaattttatgttttttcttatgtatcattataaaccctattgcattttataagtaataaaatattttaagaaaaaaactttacagtttattacctaatggctatttttcctgccttttgaataagaaatcctaaattttcgttttgcactgagtcccacaaattgtacagccagcccagctgggaatcttgaatccccaaactaaattttgaaggagagattttgaagtctgaaagcaatcaggatgtttgagaaagtgccttttgctttacatattagtaaactcctatacttcttccatgttctccaagttgctgaggtgtgtgtgtgtgtgtgtgtgtgtgtgtttcctttaagacagacatgatacgctataaagataagaaatcgatatccagaagggagaatcctgcctccctatagcccagccatggtgtccaccctcatatcactgcttgtgatggcctttatacttagcgagtaaagtctcatttgatttcattttactatggatttaggcttccgttgatctaccatctatcactaatgttgtaggaggaatgaaaactcacataggaactcatctggaggaccttgtcttttcttctgaaggggcccaaggattggttagggtaacctcagacccactagattgcatattgatgtgaaaatggttttggggttccatgatgcaagacaatttctccttgcattcccatactttacactgtacacaactagtccttaataaatatttgctctgttaaatagaataaaataattttacagctagaaaagcacttagaaatcttttagtccaatttcactttacaaagagagaaaccatatccaagatgccagtatggaaccattagatgagccgggagtagaaagaaactggatttcctcccttcctccttcgtattgtttcctctgcctcattcctgcaggaccacattgctgagcaaagagaaactgaggaaaatccagccactttgacctctgcagtttgggtctgggaaagacttggtccaatcagtttgaccatgagaatggagagttccaacttgtgtaagtaaacatttgccactttgggccacagagatactcatgaggctgagccattgttattctaccagcaaatcagtccatgactcactggcttctgtaggagtgagccaaaagtgatggtgccatcctcaacccctggatgtatttctgagaattttcctaaaaatagcaagatgtgtaccttatggtgggtggatattccttgaaagaaggatgtgaacataaggagcatcactctacattgtttaaaaatgatcactgaaattgggaagctaaggggaacattgcccctgtgtagctggcagttcatgaaagtgctggaaaagcttttccgggccaaccctttgataatgagtctggcaaaaaacgaaataatcaccaggctgggaattttgtccagggcacggctatattcaaggtacagttaatatacggaacgctgtgctccatgtgagtggtcatattcagaccattacattcagttctggatgtcgtaactcaaaaggacaaatattaacctatgtatctgtctccaagaagaaagtaatttgctcaatgaaggatttgataattgtatgaggaatgggtgagataactgaagatccttagaatggagaaatttcatatatgtaaaagcacacattatatatatacatatatttatgtattgagttgagattcttaatcatagctgtctgtaaatatttaagggtgtgagatgtgaataaataattagatttagtctctataactccagcagactagtgagtacaaatcacaggaaaggggctttcctcctggaaatgagaaagtcttggtttcccaggtaccatttctcatgatcagtattttactgtcagttttctatttgtactattctgctaacaggcacaggaaatatttagccttccattaatttattcttacagaagtaattttaaaatttcaaaagttaaagtagattagaaagttttttttttttttggcagaaacagataaacctggaaacatacaggactgaaggactttctcaatatcttggagaaaaacattatggtggagtttgggagaaaaatgatagatatggaatctgtgccagcaatggctgagacaacagcagttcatgacagaagagttgactcatactttagaggaaattccactaaagatatgagtcagtcactgtgtttaagcacatatcatattgatatcatccactttgatatcaaaaaataaaattatctcaataataaagttacatatgcttacattttttgaatctgcagcctgatgttttctgagaatttcttcttgttttttcaacactttgcagaaagcaagccacatagccataggaaaagacttcttaaaacatgccagatttctccttgcaaaccagcccagtctatgggtcaaactattcctattgttggagtattaataactcatggaacttgtccccctcctcctttatcattgtactttaattctttaccttttattaaagccatctttactgaagaaatattcaacattttgattgtcggtaccgtcaattctctgggaatagcaaggtcatggcccaggcttgagaagcagaacctgagataatacgcactcgaaatattgagtggtcctctctctcttgctctgatctttggcttacatattgcctaaagaaagagttttcttcataacaaacgagtcatgatagtagacttaacctaaaaggaaggcattattttttcttgtttatgagagcgaattatggtattttcttaatttcaaacataaactcagcccatcattgaataaatatcaacagcatctacttctttataatttatgaataatgactcagtagtgtgcataattatagagttagatctctacattcttactgtgcatttaatctctgattgaacacccagtctgtttgactcattgctgcttttgtgcacctgagtgcctcatagggttagagaaaaacattcaaccagcaagttcagtagttagggatgtggccacaagatggcagtgctcctctgctgaggcagaatacagggttcactttagtgtgtcctgaatgaataggtttatggtagcagcagagcctttttcttattggttggctacacagtgtgagaaacccctatggctgccagaggagagaagagacaacctgatgatagaagtaactcttataactggaggttgcaggtcaatgactgatcttaattgggaagaacaaggatgacatccattcgagctgtatttatattcctgtggctgcagctggactgtgagttgagggtatttgggtaacagagtatattagtgaatattcttcagcagttcaaagaggagacttgctttattcaggtttcctctcgttactatgaaaaataattctagagagtaatgacctaacaatccctcttctttctctgattttttctttctgcatagtggtgaatggagagaatgtggagcagcatccttcaaccctgagtgtccaggagggagacagcgctgttatcaagtgtacttattcagacagtgcctcaaactacttcccttggtataagcaagaacttggaaaaggacctcagcttattatagacattcgttcaaatgtgggcgaaaagaaagaccaacgaattgctgttacattgaacaagacagccaaacatttctccctgcacatcacagagacccaacctgaagactcggctgtctacttctgtgcagcaagtacacattgcttcccaggcacctgctacccgtacacaaacctgagactggagctgaagctgcaccccctttcctttgtcatagatcgtcaattatagcatttgtcatattgtttgtttgcaagttgaaactaacatattgacatttaaagcatataataaaaaggttaggttcaatgtttttgtatttttagtagagactgggtttcacatgctcagctaattttttctatttttagtagagatggggtttcaccatgttggctaggatggtcttgatctcctgacctcgtgatcctcccgcctcggcccccgaaagtgctgggattacaggcctaagccactgcgcccagcctaatttttgtatttttagtagagacgggatttcactatgttagccaggctggtctcaaactcctgacctcaagtgatccgcccgcctcggcctcccaaaatgctgggattacaggcgcgagccaccgcaaccggccctatcttacacattcttattagtagattacaacaggactttggaccaatggttaatttacagacagcttgctaaaaatctccctgcctcattttcatgttttgactggattaaacattactaccacaatttcttttaaaagagttatatcttttagtgttgtagataaatcagtggaaataaagaaggtgcataaataattaattccctatttctcccacctgtggtcaagagtaggctaatttcaagatctcttgtattcttcctaaggatggatctaatcagcagttggaatgggagaacaattcctcctggctgagttttggctgttatggcttgttcttatagggaaagtagttagattaaattagggttaaaacagctggacaagaaaggtcagctgttccttgtctcttccggctctgagggctgcctgcatttcttggcttgtggctccatcactctgatctctgcctctatggttgcactgcttctcttcttctatcatctccctctgcctccctattataagcacacacgtgattatatttaaggcccatataacataggataacttctcatcccaagatccttaacttaatcatatctgcagtgtcttttttcccttggctatataagataactttcatggattccagggactggggcctaacttttttggagcccttattttgcctaccacagttggcatgcctggtgctatctttttcagaagttgagaaagaaaatcagagttccagatagaaaaatagaaaccacatcaattgctttattttattttctcagtttttacaattttcagtttttaaattatcacttaaaaaggaacacattttgatatgcagttcaatgtgtgaaatttgaattttgatatattgcatagtttgatgtaaccattacataactatgatacgaaacagattgctcatcccaaaaactcccttgtgtgatctgtgtgaaatcacacctccatctcaaactccttgcaaaccttggtctgttcttttatatttttatttttttctggaggtcacatggatggaattatacaatatataatcttttgaaaagtctgaatcttggttacagaaagcacacaccattgggcacatacatgatcatcatctctgctaccactcttttttttctatacctgaatgttttaaacttttgtcattttacaggaataactcaacatttcaaatgtttgaatttctttggaggtttgatttacagtttaaagagacactatggcaagtatagtgtttaaggaaacggtatggcaattgataatggagaggttcagttgaggattgaaccaactcctagaatcagagttaaacacatcaagtttagttgtaccaacactaccctaaatttttatcaatagatatttctctaacattttaaggctaagtgtattgaccgaaatgtattttagtcatattaattgggtatggttaatacttggattttcccaggagttagcatagaatgacatatctcacaattatttaaattttttgcactagctgtggctttgtagaggtgaaaagtgttaggatggttattacctcaagtaaagcctgtacctaagcaaattgttttattaacaaaataacaaagtggaaaaaaattacaaatatatgcaacgttgtaccattagagttgaaaaataccaccaaatggatgaaaaagaaaagaatgcaaagatagtataacaaccactggttccagtcatctagataatactgttcgattatacttgcatggagctgtctactttatccacttatacatgtgtttcaaggacctcgagtctgcactcattttctgaaaagcccctaaatagtctctgaagaaattcagtttaatatctgtaatatgaataacttctcaattcttgccatttaaggatggataatgtcaaactaattggtacaaagtaaccacagatcaattcctcgtactttaactgttgaactggtaataaacagtacctaataaggtcattttcacaaggttgaaaggcagtctttctctggaatttttttccaaataccaactcatccaagcttaggtcatgtaaaggctgattaaatgaaaggccaggaaagaaaactgtacctgttggtataaggactgagtataatgggtttatttatctagataagtttgtgaaagaatgaactatataggattccagatactaggagtaatatggacctacaagtcaccagttgatagtaagacaacctatgatggcaaggtgaacaactcagggccatgaaagtgaagggtaataatatattagatcatggaaattcaaggatgtctgataccgtaattaattttagttttaatatttctcatgtgttgtgtcttcatttatagaggataaggaggtgataagaaaagagaagttctgagtgagggcaaagcattatataacttcccggaaaattgtgttcccctatatatagataatttgaagtgtcacatattcaactgtttccttaggacagtattccagttcatattccatttttacacttttcatggaatcttataggtttcaaaaaaggcatgaactggccactttctgtgttctcctagaaaagttttccccaactatttgtataatattgcagccagtacatccctactgtgatgggctgtctctggaaggttgctaaaacaagtattcactggagatcatttggtcccaccaggcagcctttctggccttgatatatcttatcctcactgatcaaacaaatcaataattgatccaagatgtagttactaaaattttccatggatttttctgcatgttctgtaagaggtacttgcatgaggacgttagtcagaaaggcatgtttagcatgattctctgctcatgtatttcttcctggcttctatagtgtctttcctactttggaactttgtctttctttgagtagtatcaataaatcaaataattttcgtatttggtatctattttatagcgatacatgagatgtatgaaaaggttaagaaggttaagaaatctcatcatctccatagtatttgagagttgtgaactatgttaaaacatataggctatcactgtatatatttttcataattggacatagcaaagagagagccacaaattcagttactttaatttgttttgcttcttctaaggaattagattttataatggagtctggagcagtaaatgcattataaaccttgtgttatttcttttcagttttgaagataagacattaaaaacaaaattaattcagaattaggtatgagactgtccaaaatatctgttctgggatggacacttcttgagttacagaaatgcaatcataagattcattgattgagaagtgtaatggagttaaacgctatgaggagaaattaataatattgtatagttagtccaccaactggtaaaaaaatggttgtttttacagagtagatcatttgtgctgtatgtggcatcataagacttaatggtgatttcagtgaaagatctggagatgcttcaacaaatttagacatagctgaaatcattttaagacaaggaggataggttgtaatcattataataagaaataggctataataggcaatgggtctttgttgtttttaatgtaattgagtaatatccctaggacatggccttactgctaatattcacaaaacgaaagccttatcacaatcaattttcctataatagtttttccttgggagacgtatggagacacctaggattcatacctttcagcagtggatgtacagaatgtaatggcttgttatggctcatttggggtcccagatgacataataaaaatgcataaattcaaaggtttgataacttaatgatcagagtctggtgtctaatatggcctgtataaacagagctgggctgtctaaactaacttgaaaaaggaagaaaacttttaagataggactcaatgtctgagggcttcattctaaactctcagaaaaaagagattagtttttttctgcgtagaaaagagaaagagagattagtttttttctaccgtttgttccccagataagcaactggacagactttgggaataggacaaatattgctatattaacatgtaggtccgatgatctgcagtgattagtgcaaacagcttttccttcttagcataatgtgattaatttctaccttaggagaaacaacaacatacatagatgtgaggatacataattgttacatcttccgttgccttcattattcattacatgtagtattttaaagtaagtgccaacctctcaacctcattgctcagttccatcacagatgcaatgactgaacatagcaattggtcgaattatcaatttcccttctaacccgaccatgtttattttcatatttaagttatttattatcaaattaagggtgggtaagtgcaaaggaagtttgcattgggtgaggttcttagccagtacatagagaagtgttagataacacaaactagcttgctacaccggaaaacctccgtttcctattccagggcagcagcagcagcagcagcacatagtccagtaattcttctcttacttcatcagactcacctcacaatgcagagccctgaattttaagaagaacaaaatatattctctctagagaaagaaccaaacatgttgctctccagctgcctgagggtggtcacagcttcaatgtggctaggtagggatgcccctggtgggaatggtcttcctctaagacccaaggactgggaaacgtctcatcaaaactttgggacagaagaagtaacagggtgtaaaaatagaatttctttgttccacatcactcatccctaaaccttttggttctttgttttctccttcagaatctggttttgctgagaagtaactcaaattaaaccatcagtattggtgcatgagaaggaggctgtgactctggactgcaattatgacaccagtgctggaagttatagtcctttctggcacaagtagcccaggagtggggagatgattttccttattcatcaggactcacgatcagcaataagcaatgggtcactactcattgaatttgcagaaggcaagcaaatccatcaacttgtcatctccacttcacaactggagaactcagtgatgtgtttctgtgcactgaaagaggctacagtgagagaactgttggagtgaggtacacaaaatccccaagggtctgcttgagacatccacttgctggagagaccaaagaaaggattcaccatcacagacaggaagtggctatggttgtgacagcacaggtgtagcatcgggggaaaacactgtaagaaaatacctctctaggcttatagaccatttccagaattatcattcatcaaaaacatcctaatccctgagtctttggtttgaagttagacacaccaaaattttgaccaatgattgagagaaagaactgccacaataagcaatttgccatctggccactagattgagctggaagaattggctaaggtaattcagaaacatatgactgaaagatgaataaaaacaaattcaacactctttgtgaattgttggattttcagatcagtttattcaataaatgctaggtgtcttcaaaaagtttatggaaaaaagaaattgcgtattatgaaaaacggtgcatggatttcaaattttctggcaccaaaataaacttatactaagttgttataacatatctgaacaggatttagtttgaggcactaagaaggataagacatcagtttgaaaggagcccctatcagagcaacatgaattctgttaaacttgaggcaagaacaaacatcaaatttatggtgaaacttgggtggaagaatggtgaaatcactgatgctttatgaaaaatttataggctcaacactccaataaaatcagccatcctcttgtctgtctgttcttaaacaaaatggataatttgtttaagaatagacaagaggatgccgatgaagcccacagtggcagacattccataacaatttgtgaagaaaaaattaaccataagtgccctaatcaaaaaggacggatgattaacagtggaaacaatagccaacactataaatgtctcaactggtttagctcacacaattctgactgaaaagttcaagttgagcaaactttgtacttgatgggtgccaaaaccactatgctcagatcagctccagaaaagagcagagctttcaatgaaattttgaataagtgggataatgatcttgaaccatttcttcaaataattggaacaggagatgaaacatggctttatccttttgattctgaagataaagcacaatcaaagcaatgattagcaagaggtggaggtccagtcaaagcaaaagtggcccagtcaagagcaaaagtcatggcaacagttttttgcgatgctcaaggcattttgtttattgagtttctggagggccaaagaatgacagcatctgcttattataagaatgtttagagaaagttagccagagctttagcagaaaaatgcctgggaaatcttcaccagagaatccctttccaccacgacaatgctccaacttattcctctcatcaagcgaggagaatttaggtttctgtgggaaatcattaggcatccccctcacagtgctgatttggctccttctgacttctttttgtttcttaatcttaagaacatctttaaagggcaccacttttcttcagttaataatgtaaaaaagactgcattgacttggttaaattggtggctaatcatccagtaagtaagcaagaagaatacatattcaccgagaataaatatgtatcccctatgtgtacaacgtactgtattaggacctttgactatactgacagtagtataaaatgttactcttaagcagaatgaacttaccagaaaaatcttgcaaatcaattgaggaataagatgaaatgcatgaaaacttaaccaatagataaaattccaagtatgtgggcaattaagttttaggggtatttttaggagaatagtgtggcaccgaaaagacacaagtaagcatcatggagagatagaaaacttaggcattaaacgacagacacacattgaattcattcattatacacttacttatgaaacacacaataagcaacaattgtttttgtaggtatgaagagtagaataatgaataaaacagacacatgcagacaacaaagaccttccctcatgaggtttagatctacaattgtctatagtgttcccttcttttacaggaatatccaatataggtatttccaatatatctgtttcactataggcatttgtcttgcctattctagtgattggcaggttccatgtgaccattacaaggcatagtcactgaagtactattaatatatctgtcatttactaaattatttgaccattgacaaaattacttaaactcaggccacctagacatcatcaattgtaataacaataacaatcacctctccacatagttgtaaggattgaattaaatttcatgaatttaattaaatgattgaattgtagtggtagggaacaatttctcaccaatggtagctatacttggatataaatgagatattgcaacaaagacaatttgaaataaaataacaagaaaatttaaggatagataaggcttaaccctctactctcctgctattggttatattattatattttactatatttaggactgagagtcactatttcacactggcctgattccatccaattatttgaactatttctttatctcataggccttacgggtagagaatgaagctttcttgcttcaggtataacttagtgtaaattctatgatggattcacatgagcgttatggagcaggagtcagatatacaccattttatactgagctacagtgccaataactagatccataactgggagcttatttaacagagctctgctctgggagaaaataacttttctaggtcatccttgggggaggaatcctttttagttattcaatttacaacttgtacatacatggtagatgcccaggaagtattacagaagaaaaaaggaaagagaaaaatctaagggacaaatgctagatgcagctgactgagaatcagcacctggttctgccagggtcctttcccatgctacctcttcagagatcagagacagctgtgcgatctgtgcatgggggagtaaatcttgtttctggctggatggggagactctcagcttcctacaacaaaactatgaatattcactcagagaaacaagagatttggcttggtagtgtttgagggctcccaggccccagccagagtcctccgtgagtctgagggataaaaatgaagaaggctttgggagtttcattcttgattttctcttgggagctgtgctgtgagttgctgggctctggaaatatgaaaaagagcgagtgtagtatcttatttaaaagtctggaagttatagaaggttggttaaggcctcagtgctcacctgtgggggctgtgaaaagagagcatatcttctaaaagctgtcagccatgaatgaatgtcatctgtctgtgcttctctgtttaaacaggggtgaacagactacatacgccggagcagagtccttcattcctgagtatccaggagggaatgcatgccattcttaactgtttatgtgtagggggaactttctttataacctctgtctccaaacagaagtgaagaataatgcaccatctctcatatgtgaagaagctgaatttatatggaattatgtttccttttgtcattattgaaatttcattcctcaatgtagaccatacagatcctgggcctgcttgcccagagtccttccactcctttactgtttgctctgagaggtcacagtctctgagtccatggagcaaagtttcccctggttgtacacttagcagcatttaacttatattttcataatctttaaatgatgtttgctgtatctgtgtatcatctactccataatttacttaatttaacattaaattgatttctctattaaatagatgccaaaaatatgtaaaatattgtccttactttaatagatactatcagtgggaccacatatatgttataaaatgtgcatttgatgtgcaagatattttttcctaatacaaattaaaataatgttacatatataacagtcagaaagaccatctgtgttctgcctaatatgacctcctgtatcaatcgcactttagaaaatacatttccagctcatgcccctcatttgatagatgaaaaaaagcaggctccacaggcatggcttcactttactcaaagcatgtgttgcagtgaaatggaagcctggagtagaagccaggcattctggccccttgtcagttgctttttccatgaaagatgaaaagcgggattcggtgtttgagaaaaggagttgtgtgttgtaattttgaactaaattacatttttattacttatatgtatatataaagatataaaatgatatataaagacataaaacacccagaaaaatagaacacacctataatttcataatcaagaaattataactattatcctgtaaaaaattttggtatacatatgtagctattttttctataaaagtggtttgcaatatatccagtatttattaccatgcttgtttttctcaacattatgtttaggtgttttcatccctggaagcatatattgaaggcacagttttattttattttcttttattttcaacctttattttagattcagggggtagtacatgtgcagatttgttacctgagcatattgcatgatgctgaggtttggtgtataaatgatcccatcacccaggtactgagcataataccaacagttattttctcagtccttgccccttttctccttccccctctagtaatgctcagtatctacatgtagtctttatgtccatgtgcactcaatgtttagctcccacgtatcaatgagaatatatggtatttggctttctgtttctgcattgatttgcttaggaaaatgatctctagctgcatccatgctgttgcaaaggatatgatttcattcctttttatggctgcatagtattccacggtatttatgtgtcacattttctttatccaatccacttttgatgtgcacccagagggcataattttaagtgattgcctagtttccattatatagatatattttaaaaaatttatcacttttggtattatttcctcttatacagtgttatagataatgcttcttaaaaacataattaaatttgtaattttaatggaaatagagttgcttgaataagggagaacatataacactaaatgcctaatgttcctgaagatatatttcaccaaagtgtaatttcaacagcagcacatggtgatgctgatttttcaatactttatcaattatgaccattattatcttaaagtagcttccattttattaataaacactttagcaatgttttagttttcttttaaagtgtgagtttatatattttattattaaaaatgtgatttaaaaacagagtccatcacatagaatattctttcatacaataagattttttaaaaggtttgaagaatactgttctggcccacattaccttctattaggctggtgcaaatgtaattgtggctttgccattactttcaatggcaaaaaccgcgattatttttgcaccaacctactaactggtctctttttcctcaaggcaatctattctccatgcttttgctactcagagtcggggccagcactgtctggacttgtgcagatgctcagcctccacccaaggctgactgaatttgaatctgcatttcgttaacattcccaggtgattctatcacttcaaagtttgagaagcacccatctgatgggttcccagaacgattttttaaagtataaataaagagatgtctctaattggcaaacatgcttcaatggctttctattgctcctggaataaaatgcaaatttaggctgtggcatacaaagatctgtatcattcaaacctcccctgtcccttcagctttaaactcttttttcctggctttctatgcagcaaaaacactgacctcctttcagatttctgaacttgccatgtcctttccacatttagtctaactctctcaatcatctgcagtgctcttaccctaaatcttggtgagcctgactcattttcattcctcaggtctcagctcaaataccactgctatagagaaaacctgctgacttctgctgatcatcctgactaatgtggccatcatggcttttcccctaactctattacaacacccttgttatatttcattacggtaataatcataatgtgcagttatattgttggtctacgtgtttattgtcaatgtgtttattgtctatatctccacctaggatacaggctttacgaggtcagaggtattgtttgtttagtggacagctttattcttagtgcttagaataatgactggcctataatagtcagtcaaaaaaatattcactaaatgataaatggatggatgttatttggccctcctctttccttttttccttcctctcagtctcaccctagcaactttgacctctttttgtgttctctctgcttcattatgtggggcagctcagttctttctcacccttgctcccagactcaaaacccagcctttctgtgctcagtgaactctggtcaaatagttagatccattcagggtctcagcctttcctcactaaagtgacctcactttatcagatgtgatctgaagcacttagtcaactctaaaggctagtaacacatgatgaaatatctaaatgaagaaaaaaacacttaaaacattttagaaagtataaaagtaacttctcaagtccaataattatgagctgaagtcaaagttataattcaaattactgtaagagtaaatgcccctcaggaaacaaattcaaataaatagccttggtagacgtgttgtagatcagatttttaaaagatctggtttaaagatatttacgttcaaaggactggttcataattaccctgcttttgaccatctgtgtagtggctattaggcttctcaaaagattaatagtcatttgagttggtaacactaatttcccagaaggagtctttatttcattaaagtatattataaaattgctcaagcattttattggaagtgatggttaattacctatggggctatatacattacatccttcaaaaaaaggtctcttccagactagtttggagaaacttatctttctcacatgtagttcaagcctttactatagtagagaagggtgttatcagttcttggttttttttccctcttcctgcaagctaataagtgtgttgtttcatccaggttttcagtaaagacatgagactccttagtcagagacaaaggattttgttacttatggcacagcaaacagcctaaacattagtaagttcacttcagttgctctttccttaagtccccaaaagatgatacagtgagtgctgatgagtagtttgcatgcagtggtgctgtgtcatagatgaggaactctgagcctgggaaatttatagcaacagtaaacagtaagccagcttgctctttgtcgtacagggagtcattaactcatcccttaaggttgattgctgcaagcctaactctgaaaagtggtcctggtagggaggtcatggctttacactattggcatacccagcaggtcatgtaggggtacaagagactcatagtggactgtctttcaacactatccactccatggtcttatgtcatgttagctgctggaaatttttcttatgagtattccactccatcagtcattctgattaatttgactagagaggtagagagtaaacgcatagaatttgtcttacacaagatttaattaaggctactgtcagtagaactctaagcatgaagaggagaccaacctgcaatagcaacctcaatcatgcctcataggatcctagattctcccagctgtgaataagtcccaaagtacagacagctaggatatagtgtattatttaatatgacctacacatggaaatttagactgacatgctgatctttgttttaattgccaaaaagttaactattattcccaatatagagatctcctatggtccctattccccagacataaacataaccaaaggtgccgaaattaatccagtttgaaatttattgctacactttatttgggtcagcattagttcactttggttaggctatatgagcagggtcagtgagtatttgaaacttctgtaggcattcatggtataacccaagacagtccagacaccaggggaaaaatacacgtttgtatgaatcagattgagaaaatgttgtgctgattcctgtgttttcacacttaagaggatggggaatctgtattgggaagctgccattcatgttgtagaaatgttcaggagaggccatattcacaggagtttttctgttttcatggaatgtggaaggagatgacaaaccaacacacaaccaaactatatggttgccttgccaggctgtgtgcttcatctagcatacaaagagagcattaatcctcactcgcttcacctccagtggtccaagattttcccttcctaggtgccagtgttgttgctctttttatccacaatcacaaaatttgttcatcccattctagtagctaaagctttgcctttattgtggtcggttcctagtcatactcaaactttttgtctagaacaataaatagaggaaaaaggtattttatgacatttatatatacccattttatttattacctgggccctcgtggaccattgtacaataattcctagagcagaacactcaaattaatgatagttaacctcataatatatgaccatgtttgtccaacaaaagaatccaggtggctgaaccagaattcagttttaataccattctgaccatgttgctaccaggacagtaaacctaccaggctgttctaaggttgctgttaggagaaaaaaagaagcatcatgccttccacttctagaaagttagagaaggtatactttttttccattcatctcgttacatacagctaatgattctggatattacagatgttccttgacttacaatgggattgcttccccctaaatgcattataagttgaaaacactgtaagtaaaaagtacatttaatacacctagtatgctgaacaacataacttagcctagcctatcttagatgtgctcagaacacttacagtagcctatggttgggcaaaatcatccctaacaaagcctattttataatgaagtgttgaatatctcatgtaatttattgaatactgtaccaaaagggaaaaacagaatagttgtatatgtacataaagttcagtttctactgattgtgtactgctttcataccactgaaaaattataattcaaaccatcataatctgtgcataagataaaaaaattaaaagattctaaaaagtggggagaaaaagcccaactggttaagaaatttcagaaacgctaaagcagtgagttccatgagtttccttttgcctcatacaatcaggagtagccactgacctggaaatgttagtgaatatgtacaaaaaagcccaaagaccaggcttttgctttctttagccaaaaaaccaggagaataacagactgtcaagacacaaaactgaaagactataaccagtttactccagccaaataccacagaaagatttacagctaccaagcacatctttagtcaataaaaaagtagttgcaacctggtaggagaatttgtgttatttttaacttacctttgctccatctcctcatcactggctttaagacagtctttaaattacatcctccattccaagtatgggttcctggtgctagaagaagcagagtggaccttgttatatcaaagtagtgcttgattactttgacctctccagtggctcattgaagggctaattcaaagggcttgcctgtgtttcacacaactcaaaatcccctcagggtggagaattggctacagagaaaagtttttttctaaaaaacaatttgctaaagggacttaacagcaggtaggagaaagaatctacaaatgtgaagataagccaaataaaattattcagtctaagaagcagaaggaaaaaagaatgaaaaaatatatacctaagagcttaaatgacctgtgggacattaacaatagcacagacataagtataacagaattcccagaatgggaggagtgacagaaagattcaggaaaaatatttgtgatatgatgaccctaaactccccaaatttgatagaagacatggatctacacatccaagaagttcaaaaaggactaagtagaatgaaggcaaaaaaattcacagtgagacatattatgatcaaattgtttaaagaaaaagacaaattgagaacttgaaagctgcaagagagaagtgagtagccacatgcaagagatccttaataagattagcagtcaattgttcatcagaaaccatggaagccagaaggcagtaggatggtataaagtgtttaaagaaaaaagttgtcaaccaccaatttatatctggtaaaactattgttctaaaacaaaggagaaattaaaacagccccagataaacaaaaactgagtgtattcatcacttgcagacctgctctatgagaaaatctaaagggaatctttcagacagaaaagaaatgacactagacacttggagccatacaaaataatgaacaatgatgaaggtaattacataaataagaataaatgccaatatttttgtagtttttgtttataactcccattttcccctaaattatttaacaaactagtggataaataataattatagatacatattaataggagcacaatgggtaaagatgcttgtgtttttgcaggtgtataaaaatctcctttgttgtttttcatagtacaacttctgtatttcaaatgaacacaaaattagtagcatttgcagtagtatcttaaaataaattgcctttgaataaaatcttgctttccaatactttgaggtccacgagacatttctagaaaattttatgccatggaaaatgaagaccacttaatccagtggagaaggggagtgtgatttctctttgattgattgccataacactgtccttaaggcatatgaaggagagttctatatgtcatctagacattattaggcacagaagctttttcagtacaactttgatgttatgtaaagtgtgtcatcttgctagcactgatatcgctcttgggtacaacattagatctattgacccatactatttttgttacaaatattcaaaaggtgatttttttctacaaggactgtgcttcaactccacattcaattttaaaagttatatatttttttaaataaattttccaagactgtggcgactgccatcttgggttgctccttctttggtttttacagttactgagaaatggcttttgtgatttctgccacttgcaacgtactcttagagaaagggatttcgatattagtatattctctttcattctatttcctatgaagttgttggtgggaatagaaaagacctgcccaagccatcattgatggatactggctacatggtccttgagtagaaaagagcctgcatccttcatggcctccagccacaagcttctgcaaggaaacaaagcatgttatgaacaagaggaggaacagtagttgtttgtgcttctttctctgtagacacaattaagtttcttgcatagataacccttcatagatctgattttctgtttaggttgagatggaaaggcagaaagagacaccaaatttataacttttggaaattaatttgaagatatgagctttttacaagaaaggcaacgagagaaactagaaaaataaacagtcacacaagatgtcattgaaagtctatgtactacttcctaaacatactttgtgtactcacttcccaagggtaagatgggtactgcacacagaggcagcccaccctaagggaaggatcatgggaaaggggaaagcctataaagctctagggtcaaggttaaacactgcgctttacctcagtgccgggcttggctctcttccaagtgtaccttcctttctttcctattctaaagccttttaaaataaatttccacccttgctctgaaaaaaaaaaaaaaagaaaggctatgtactgaaggcaggtttatctctattataccaacccatgtaagtactgttttgacatgcatgtgtcattggtgcaagatgcaatggctattcccaagcccctctattccctggtcttgttaaaaaatgttgctaaggctgtgagctagaaccatgcttgttaagctagattttaggtcattctgttttgaaagaattattttgaattacaagaaacttctttaaaaattggagataacagaatggtatagggatgtgtggcctgacatgaagagctatgcaatgtgaaatgctccttgaattgcaagaatctcacctaaatttttataatagaatacttcatgactgttatttcagtgtaggaaagtggctattagaaacaactgctcttactcatacaacaattgccatttgatatcatacacatacacacataaacatccccacagacattaacttggagcatttgcttctcaaatttttaactgatgtgtcagatttttaaagtgacttgtttacataataaggctctacattttgagtatatgtttgatcactatcatgattccacaagatggcagtgtgttcttagggaccttgaggacagctctcaagtgctcgtgtgtgtgtgtgtgtgtgtgtgtgtgtgtgtgtgtgtgtgagagagagagagaggaggaggaggaggaggaggaaggatgaggggaggggcttagtggtgaattaggggtgttaaaaagagcatcatttttttgaactggtaaagcagattctttttatgatttttaaagtagaaatatccattctaggtgcattttttaagggtttaaaatttgaatcctcagtgaaccagggcagagaagaatgatgaaatccttgagagttttactagtgatcctgtggcttcagttgagctgtgagtttggggcatctttatataggaaaataatgtacagtatctggagttactgtctattctagatctataggtagaagcatgattttttttctaactaagggaaagtaggggcaccagtgaaaagaggatttaaattctggggagtaagcatctattacccagccagtcttctctgtctgaccactgtctttttcacaggggtttggagccaacagaaggaggtggagcagaattctggacccctcagtgttccagagggagccattgcctctctcaactgcacttacagtgaccgaggttcccagtccttcttctggtacagacaatattctgggaaaagccctgagttgataatgttcatatactccaatggtgacaaagaagatggaaggtttacagcacagctcaataaagccagccagtatgtttctctgctcatcagagactcccagcccagtgattcagccacctacctctgtgccgtgaacacacagtgctccccagacacctgcagtctgtacccaaacctgccatgccccaggaatgcctgatgtagagcttagactgcagggtagtgaaactccccttgctctctagtttcaagtggaaattataagaaccagtatggaggattaattaattagggaagtattttcataattctgaaaataattgaaaccctgaaaaaaataaaaacaaaaatcttggtctggttgacatattttttagtcctgtttttccactatagttttaaatatttttttaattgaggtctgactgataaacaaaaaagtatgtgtatttactttatacatacagcacaaactatgccataacatatccataatttctaaaagtttacttcctccctccttttttaaaaattgaggtatgattgctatataaaaaggcacacatatttaatgtatacatcccgatgctcagtctagttttatgccacctctttatgagattggttttatggtttttaaattacataacaagaaaatattttcacacaatgacagatattctctcatagttcccaggacaccttcgtctttccttctttagttactcaaagtgtttgaaagtcattaatttgggaatgcaacagcaaaacaggaatgcaaagcagagaaaaactcacaaacaaatgacttcaaaaattctacaagtcaaaaattctttttttttttttttttgagatggagtctggctctgtcgcccaggctggagtgcagtggcgcgatctgggctcactgtaagctccgccttccaggttcacgccattctcctgtcccagcctcccgagtagctgggaatacaggcgcctgccaccacaccggccaccatgcccggctaatgttttgtatttttttttttagtagaaacgtggtttcaccgtgttagccaggatggtctcgatctcttgacctcgtgatctgcccgcctcagcctcccaaagtgctgggattacaggtgtgagccaccacccccagccaaaaattcttttaattatagaaacctcacctcatctccagcctcagccacagcactactcctgatttatgtaagggtatatttcatggatagatggaagaactacagtcagagggtaagacctggttaaaactagaagtctagatagttgcagtgactaaatattagaaaaggtctatgttgccattttggggtaaagtctgaactgaactcaaaactcctggcttgagccttgtaaaagaatatattaatacctttgtacttaagtgtggcttggagatgatagggagcattagccctagccacagcatgccatatctccagtcagggcatgggagcatggaacaatctaaaattcattgagaaggatctctgagtaagtatcttaaagaggtccagacactaaggggttttagtataatgagcaaagacctgtgtgaatcaattcccaaagactatatggtattgagaatgtttcagcaaattttcgtcaggagagttggaaatgctgaacagcatataaatgcctccctccgctgactacctggcattatagatttgtcctgcaatgtatgccaagtccacgaaaaatatttacttcctaatgaaaataatgccatttaatatttagtacattgagttataggaaaaagcttgaaaagtgacatttattgtaaaaccgaatttgtggactgttagtcatgacattgtttaggtagtacaggaggtggaaaaattttggaaatgaagaatcaagatttctattcagttagttcacgtagttactgatgaaagatgcaagccaatcaacagttgcttcaaactgttaatttacagaactgaagatttaagaaatttttccaagtcatgtaagatttgtaaggcagtgaggatgatcagaaagttgtactgaaataaaaatacttaaattttagtgccacttttatcatatgccttcaggcaccctggcactctggaaagaccctgggctgccatgctcgtttgaatatcaattatgttgctaacaggccgtttatattaagctgtactattatatatatttcaggtttggatttaggattaaatgagatgaaatattgtcttgggataagttcattagaagcagagcctgaattggaaattctttatccataattgattgagaaaaccgggtcgagatgggaaaaggctaagcataaacgtgccagctagtggagtctttatccaccctgacctcatgggagctctggagcatgaattgcatcacaggattgatcctttccacactgaggcaagggggccagaatgctgacctattgtacgtaagaataaagtcgtcattggctgtggtgtttcttggggtagaggtatactctactggacaatgatgactctcattggcagaggtcgattttctagggaaaggggcaactgtgagctgagagtagccaacattcccaacagtaatagcgacaggagacagacaaattcctacgcagacatggacagatccccggtgaaacccggccttcaagccaaggacagttcaaagccttaaaaccgatctgccagttctggatagaatacatagccagagtgagaacttgaatccccactcttgcccactctctcgattggttccttctggatgatgccttttaaccaatcaaatggtgctttttccaagaccacctatggaccaatcagcatgcactcccccattctaagcccataaaaacactcggccttagcctcacagagggctacacactttgggtcccgtcttgcttaccagaggtttcctgtcactcagtaaaattctcctctgccttgctcactctttggtgtctgtgtacctcattcctcttggccagtgggacaagaatctggaatccaccgaactgtgggagtgaaaagagctgtaacaccctctcccactcgctgaactacgggagtggaaaagcctctggatgccatttcctcctgctctccgaactacaggaagaaaaaagccatgacagtagctggggatggcgacactgtcctgggaaaggggatcttggctgggcacaagcagtgttcactattaacatggaactcacctggcatatgggcagcattcaagaaataatagactttgtaattatattctgaattttaatttcattctccatttgaaggagtttatatagctggctttcccgatcttgaagagttgaaataatgttaggttaaagcacttcttcttcttcttttttttttttttttttgcactaatcacatgtagtgattttattttttatatatttttatttttttctttatttcttctaaaaaaaaacaggatacatgtgcagaacatgcagtttgttacatatgtatacatgtgtcatggtggtttcctgcacctattgaccggtcttctatgttccctcaggctaaagcacttcttaacagaaagcatctaaataaaggtaaagaaatattattcaaagctaaaactcaagatattttaagaataatgactaaggaaccactatgttatcttacttccttttgagaatgattacatgacattctgttcatcactttgtattgaggtagaaatgactctgatgattcacagttcatgactctgggcttccatgtatagagacaacaacagaaagagatcccatctatacttatacatgattaatgctattttgttattaatttgtatttaagaatggaggactgggtaacaggatggactcttcatgtcactgtgcccatgttccccacaaggtttcttctggaatggggtgcctggccagtagtgtgggtatgtgggcatatcatgtgatttggcaggcttctttttaggatgaatgaacagggaagtggtaattaagttgctcctctttgttccttgcacctaatatcattgaagatggcctaattctgtcaaccactcataataaaactgcagtaatcccagcggttcatttaaactcttgtgaaaattaaatacccaagtaaaagttggcttactatgcctatcacacacaagtacagaagcaggatggtgagaacggagggaggctagtgtagctattccatgtgtggaccttcagtatgttctcttgtgttctgttcttcccactctccatcacctactttctttctcaacccggaacctctccagggtctcacccagtaggttcccttcacttgcatttccactgcaatcttctcatagttcattctgggctggacttctcccccttctctgtttcatccatcagtgtgctcacatctacttttcatttcatgggaattgtgatagctttcatcttttcattattacttttaccattatggattcaagtcattctttttatacttctaaattttatttcagtgggaatattggaaagataagacgagaatacatatgcttcttaggaattttgaatcagaagcacatcctagtaacatttaaatgttcaaactggctatatgattttgtcttacacataaaaaatctataggcagaatcaaggaatagatcagaagtgcaagggagaactgatttcaggctggcgtgagtgaacagagtacacagaaaggagggattttgttctgaccttgtgaaaagaatccttgttggccaggttctcatttcacctgagatttctctcctcatttggttttttaagttttagggtccaatgatctctatgctaaaataagttggatgaagatggcttcttattcaagagtttcatctttttaggccagaggcgaccgctccagttcaatacagcctatctcccactcacaggggactactgcttgcctagctctgttgagtatcactgtcaatctctcccagattttctatacctcccacaaggtcctctcatttcttgtctgctggttgcattcctcccaattttctgagttaacacaggtttattttacttttcttttcctaactcttcccaggattatttatttgttatattttcttacactcatcattccactcaagtttttccatagatgggcctctgttaatgttctttttagtgtgagatataatttggcatgatgtatcagactgtaggagctttgacaattggaacatgattctttttaaacatgaagtacctaagttgttttttcctagagttacaaatatcgaagttattgacctgaaaccaaggggcctctttaacatttttgcttaacaaaaaaaattttgctttatttgtttgctttgattaattaattagtgacatgtgatccatgctgattttaagtatgagactcaggtctagtttgtttatttttttaagaatcaaataaggaataatctctttcacccaccgtaatgctgacattcagaaacacagggccatatgaaactcagcccagactgaggcaactgatcacctcccttctccttgatgaatggttttacaaaataatatagagtgtctcaatggtattccaaagtctagaatgttgtcttctgtgactagttgctcagtaaagtaaattagtcttctatttttacattactctcatttctcatgtatttaggattaaaaccatgtactctacagaaggtgacgtcatcacagatttgggaagaaagaaacactttctgttggttttgataccacatttctcaaatgagaagcaaacagttcacttccttggatccgtggtttcgcctgtggccttcagggggcgacgttgcactaaggaggcatctgtgttcattgccgaccatcctcatccactgagcctcctccctgcagctggctgatgtagctcactggtgtctgtgtagatagggagctgtgatgagaacaagaggtcagaacacatccaggctccttaagagaaagcctttctttaaccatttttgaaacccttcaaaggcagagacttgtccagcctaacctgcctgctgctcctagctcctgaggctcagggcccttggcttctgtccgctctgctcagggccctccagcgtggccactgctcagccatgctcctgctgctcgtcccagtgctcgaggtgatttttaccctgggttagtaacattccattacctttcttccttttgtaaatgtgactgtgttgtaattttttctgaatagagacatcttttcttcatagcaaagtctgtgctgcctttacttacacagcattggtgttgcaggaggaaccagagcccagtcggtgacccagcttggcagccacgtctctgtctctgaaggagccctggttctgctgaggtgcaactactcatcgtctgttccaccatatctcttctggtatgtgcaataccccaaccaaggactccagcttctcctgaagtacacatcagcggccaccctggttaaaggcatcaacggttttgaggctgaatttaagaagagtgaaacctccttccacctgacgaaaccctcagcccatatgagcgacgcggctgagtacttctgtgctgtgagtgacacagtgcttgagactgcaggagaggtgaacataaacctcctgagatgctgagactttctgtgactcaagaactcaaccttgaagtctgttttataatattaaatagcatttccaagtttctgatgcttattgatgtatgctgtatctttttcatctatttatttttaaactatctgtgactttaaagtgtgtttcctgtaggtagcataaaagaccatcttttctttttatctactttgttaatctctgtttttgcattgtgaagtttagataattaaaatggaatataaatatcaatcaggttggatttaagtatacttcattattgtgtttcacccatgttcctttttttgttctttttttctgactccttttggattatttaaatacttttcaatttacattttaatttatttatgaactttttggctataactctgtactttttgagtagttgctctgaagatggcaatgtacatgcctaaatatccagggtcttatgtgagcaaatactgtacctccttatgtgaaatgtcaaaatcttacacaacgtctctttatctaccaacactaaagtttgttattgttgttcatatatattagtcacatacattgaaaacttcaccaggcctggcacagtggctcatgtttgtaatcccaacactttgggaggcagagatgggaggattgcttgaactcaggggtttcagaccatcctgaaacaaagtgagacccccatctctatgaaatataaaaaaaatagctgggtatgatggcactcatctgtagcctcaactactcggcaggttgaagcattatgatagcttgagcccaggagttcgaggctgcagttagctaccatcatgccactgtattccagcttaagcaatagagcgagatccttgtctcaatttttttttttaaaaatcacaatatatagaaaacttcaccatataatgttataatttttgctttcaacaattatatgcactttataaaatttaaggggaagaataagaactattttatacttaacagctatttatcatttctggtatccttcctttgttcctgaagatctggattttctctgataccaggggatataactgaaattcccttcaaacttaaaaactccctttagcatttcttctagagcagatttgctgggaaacatatttttcatttgttcattacctgaaaatgtatttttaacttgccttttatttctggaagatagtttttactgggtctgtaattctgtgtcaacccttccacccctcccgctttaaagataccatttcattgtcttttggcctccatgctttctaatagaaatccattgccattcaagtaattgtccttcaatgatgtaatatattgtttttctctagctgcttcatatataagctatgtacacacatacacacacacacacacacacaaacacatgaaaaattatacaatcttttgttgtcagtggtttaatcataatgtgtttaggtgtggttctctttgattttaccttgtttggggcttgaattgataaatgtatgtctttcgagagaagaatcaaatagacacaataaaaaatgataaaggggatatcaccaccgatcccacagaaatacaaactaccatcagagaatactacaaacacctctacgcaaataaactagaaaatctagaagaaatggataaattcctcgacacatacactctcccaagactaaaccaggaagaagttgaatctctgaatagaccaataacaggagctgaaattgtggcaataatcaatagtttaccaactaaaaagagtccaggaccagatggattcacagccgaattctaccagaggtacaaggaggaactggtaccattccttctgaaactattccaatcaatagaaaaagagggaatcctccctaaatcattttatgaggccagcatcattctgataccaaagccgggcagagacacaaccaaaaaagagaattttagaccaatatccttgatgaacattgatgcaaaaatcctcgataaaatactggcaaaacgaatccagcagcacatcaaaaagcttatccaccatgatcaagtgggcttcatccctgggatgcaaggctggttcaatatacgcaaatcaataagtgtaatccagcatataaacagagccaaagacaaaaaccacatgattatctcaatagatgcagaaaaagcctttgacaaaattcaataacgcttcatgctaaaaactctcaataaattaggtattgatgggacgtatttcaaaataataagagctatctatgacaaacccacagccaatatcatactgaatgggcaaaaactggaagcattccctttgaaaactggcacaagacagggatgccctctctcgccactcctattcaacatagtgttggaagttctggccagggcaatcaggcaggagaaggaaataaagggtattcaattaggaaaagaggaagtcaaattgtccctgtttgcagacgacatgattgtatatctagaaaaccccatcgtctcagcccaaaatctccttaagctgataagctacttcagcaaagtctcaggatacaaaatcaatgtacaaaaatcacaagcattcttatacaccaataacagacaaacagagagccaaatcatgagtgaactcccattcacaattgcttcaaagagaataaaatacctaggactccaacttacaagggatgtgaaggacctcttcaaggagaactacaaaccactgctcaaggaaataaaagaggatacaaacaaatggaagaacattccgtgctcatggataggaagaatcaatattgtgaaaatggccatactgcccaaggtaatttatagattcaatgccatccccatcaagctaccaatgactttcttcacagaattggaaaaaactactttaaagttcatatggaaccaaaaaagagcccgcatcgccaaggcaatcctaagccaaaagaacaaagctggaggcatcacactacctgacttcaaactatactacaaggctacagtaaccaaaacagcatggtactggtaccaaaacagagatatagatcaatggaacagaacagagccctcagaaataatgccgcatatctacaactatctaatctttgacaaacctgagaaaaacaagcaatggggaaaggattccctatttaataaatggtgctgggaaaactggctagccatatgtagaaagctgaaactggatcccttccttacaccttatacaaaaatcaattcaagatggattaaagacttaaacgttagttctaaaaccataaaaaccctagaagaaaacctaggcagtaccattcaggacataggcatgggcaaggacttcatgtctaaaacaccaaaagcaatggcaacaaaagccagaattgacaaatgggatctaatgaaactaaagagcttctgcacagcaaaataaactgtcatcagagtgaacaggcaacctaaaaaatgggagaaaattttcgcaacctactcgtctgacaaagggctaatatccagaatctataatgaactcaaacaaatttacaggaaaaaaacaaacaaccccatcaaaaagtgggcgaaggacatgaacagacacttctcaaaagaagatatttatgcagccaaaaaacacatgaaaaaatgctcatcatcactggccatcagagaaatgcaaatcaaaaccacaatgagataccatctcacaccagttagaatggcaatcattaaaaagtcaggaaacaacaggtgctggagaggatgtggagaaataggaacacttttacactgttggtgggactgtaaactagttcaaccgttgtggaagtcagtgtggtgattcctcagggatctagaactagaaataccatttgacccagccatcccattactgggtatatatccaaaggactataaatcatgctgctataaagacacatgcacacatatgtttattgcggcattattcacaatagcaaagacttggaaccaacccaaatgtccaacaatgatagactggattaagaaaatgtggcacatatacaccatagaatactatgcagccataaaaaaggatgagttcatgtcctttgtagggacatggatgaaattggaaatcatcattctcagtaaactatcacaagaacaaaaaaccaaacaccacatattctcactcataggtgggaactgaacaatgagatcacatggtcacaggaaggggaatatcacactctgggaactgtggtggggtggggggaggggggagggatagcattgggagagatacctaatgttagatgacaagttagtgggtgcagtacaccagcatggcacatgtatacatatgtgactaacctgcacaatgtgcacatgtaccctaaaacttaaagtataataataaaaaaaagataaatgtatgtctttcactgaatttggcaagcttttggccattctttcttcaaatatgttttctgacccaatatctttcttctctccctctaggactccagttagatataacttagactttcgaatattttcccacaggtctccagggctctgcctttttttctttcaattttcaaattgattttaaggtttgtcagtgtttcctgaccttggcactactgacattttggtcctcataattttttattggggtgtggggctgccctgtgtgttgtagaatttttaacaacaccactggcttctccacactagatgcctgtagcactacataccccaagttgtgaaggccaaaattgtgtccagatttgccaaatgtctcctgggggaagacaaagtcaaaattaattggattaaataatctgtattgatctttttcaattttgcatatgctttcctctatcattttgctactgagcccttactgtaagatttttatttttgatattgtatttttctgttcaatttctatttttttctttactttgtggaacataatcaaaagagctactttgacatctttttctatgagttttagtatcttagtcatcttggtatttgaatttgttgatcttttacttaaatattagttcatttttctggccctttgtcaaataattttgaagtacatcttaaacatttcaaatattatgtgtgtacactctgttttctcctcctcttccttcttcttctttaaaaaacaatcatctaaagaatgttaatgtttttatttgaggagaaaatcaacctagtttggtttatactactagttgtgtctccccttttgtggaatttggtagctcaaaatcacagttcagttctctaatcatttgccatgttggtttgggtttatacctgtcgtgtgtagctcagggattagtgaaaccagtttgcatggctcaaatctcaggtcagttcctgaactctctgctacattggttttagtttgtcctgcatgggtgccacttgggggtagtctgagactggaatagtggttcaaatatcagttaagtaacctaaaatttgttgttctggtttgagtcagtttcacgtatgtagagccttgggattagcctgagacttaaactattttccatctcttccctagggtctcccttttctagcctgacccacagaggcagaaaattgtgtttcttgcagagttttgacttcctacaccattatcatattgctgtgtgcattggggcctccctcagggcaaagccaagagaaagaaacagaaaaaatatgaaattcacccttgtgcaggttgtttctccaatttttgacttccctacacaatctgctagcttttgggtaatttcagagtccacaggtagtttctttttttaaatttttttattgtttatttattttttattttgttcagtttttacttacaatccatggcagagattggccgtaggtatcttaaagttatctcctattctactgtggtcctgcattaatttgtggttctcgataatattaatcaagaatggctatttggcgtgtgcttttaccaccatctttagttgtattaccctttttagttaatctaattcattttttatatttgcaaatttttctcatcaagattataagaccatttaattaagctcttaaatttttttgatatttcatttcttattttccaaatttatgaaggtctttctttggtgcaaaagaattgagaatgcatacttgtttttataaataattcaagtactatattttttcctaaagtctaaaaatttttgtattctgaattatatctggatttaagagtatgttaaggcatagtaggactattcaaacactattttttttagtacataaaacagagctgattagtttttaattttctctatttttttcatttctgactttttgcttcttttaaatgaaacatgtattttggtatttggggctgtgtttggagacccttaaatcttccgggaaatcatgtatttcttagaatgctgccaacacccttaagtgagaatattctatttatgatcttattcttatttaactaagaggtgttgcttctactactatagaggattgaagaattcctttacattcttccagtgcagagcaaaaggcaatgttccaagacatcacacaatcctatggcctttgactttgaacatactgggctttgcaaatgctcagcaactttgagaaaagttaaaatgaccaccattctgaaattcagaaggagttgctccttatagcttattttccaattttttttctgctctgactttaatcttcaatatgatcccacctactttctgtgtcctagaaatatgtgtcaccctttcctcaccagatgaccttcattttttttttactcttgtgaattttagtctatttccattttatttctattctttaatttaggaagaaatattcaagagaagggaaatgagcatatagcattaggattagaagttcacactcaaaggctacacttttacaaaatgacagcattactcaattttcttcattcaagaaaatcttttccaacaggaacaaatgaatcaagaacccaaggagagaactgggcttatgctttcaaatcaaaggaaagaagtattctgactttgtcaagggtcccattagccacagagaaagcagtgactttctgcattctcgtgttttcagagttttatttttttccccatgcactatctacatttattattatttgtttttatttttaaatttcaacttttatttctcgcttggtgtggttgtatttccttcagccccacaggtgtctgtagttttattttctttacccctagaggcaaagccttcccatcatgagttacgccttgtcattagttgcatggaggcactactctccttatgtgaaatcttttcctctatggctgcacaagcatcatccgagggaaatatctctaccatcctccatcagcactgtggcaacactgaaccatccaaaactcagtccagggcaattggtctgaacccaaactctcatggactcatatctaaattctgatatgcttttcaataacgattcctcttgatgtattactccatctttacatgaaatcttattgctaatggactctaggactaaaacaccatcatagatttggtcaggaagaaacacgtcttgtggaagttttgatacatctcagaaaacaggaagaacacactaatgaacagtctgtgctaaactctggttctgcacttggcctccagagagcgatgctgcacacactggagcttttgtttctgttgaagatcagtccactgctcagtttcttcttcctgcagctggttgagttctttccagacaaagacaagtgacaagaatcagagttttaaaagcaaccagattcatctctgcagcttttgtagttttatataaacaaagagcttgtccagcaaaccttccccacacttcttgttcttggtctcttcagccgctttccttcctgttctctggagatcttgcagaaaagagcctgcagtgtttccattgctcagccatgctcctggtgctcatcccactgctggggatacattttgtcctgagtgagtaaaatttctttatcatctctagttccacaggttctgactagaaatgcttgctttttatactgagtctgcactgctttcactgatagtacattactttttcaggaactgtcagagcccagtcagtgacccagcctgacatccgcatcactgtctctgaaggagcctcactggagttgagatgtaactattcctatggggcgatgttgtgggaagtcagggaccccaaacggagggaccggctgaagccatggcagaagaatgtggattgtgaagatttcatggacatttattagttccccaaattaatacttttataatttcttatgcctctctttactgcaatctctaaacataaattgtaaagatttcatggacacttatcacttccccaatcaatacccctgtgatttcctatgcctgtctttactttaatctcttaatcctgtcagctgaggaggatgtatgtcacctcaggaccctgtgataattgtgttaactgcacaaattatagagcatgtgtgttcaaacaatatgaaatctgggcaccttgaaaaaagaacaggataacagcaatgttcagggaataagagagataaccttaaactctgactgccagtgagccaggcggaacagagccatatttctcttctttcaaaagcaaatgggagaaatatggctgaattctttttctcagcaaggaacatccctggggaagagaatacgtgcctgggggtgggtctatagacggcccccttgggtgtggccatcttctatagtcaaaactgtaggggtgaaataaatcccagtctcccatagcactcccaggcttattaggaagaggaaattcccacctaataaattttggtcagactggctgctctcaaaaccctgtctcctgataagatgttatcaatgacaatggtgcccgaaacttcattagcaattttaatttcgccccagtcctgtggtcctgtgatctcgccctgcctccatttgccttgtgatattctattaccttgtgaagtacatgatctctgtgacccacacctattcatacactccctccccttttgaaaatcagtaataaaaacttgctggttttgcggcttgtggggcatcacggaacctaccgacatgtgatttctcccccggactcccagctttaaaatttctctcttttgtactctgtccctttatttctcaagccagccaaaacttagggaaaatagaaaagaacctatgtgactatcggggcaggttccccaatacggcaacaccttctctcttctggcatgtccagtcccccggccaaggcctccagctgctcctaaagtacttttcaggagacactctggttcaaggcattgaaggctttgaagctgaatttaagaggagtcaatcttccttcaacctgaggagaccctctgtgcattggagtgatgctgctgagtacttctgtgctgcaggtaccacagtgcctgggtctgcaggggagctgaacacaaactgcctatgctagagaagttttcagagactcaatgtatcttcctgtggcattttcaaagatctcttatttttatgatggtgagtgaggcaaagagagctgagcacatccagccatttctatataattctgcaattcctgctatgtcccatgtcagataaactttgttttagaagctttttgttaattgaagaaactgcataataggaaatagtattctagaatgatggaggagacatacttcttatcacctaacaatcaggttctcaaggacctttccttgactgtgactgcattaagtggttgactatgggaattttgatatggtctaggagaaccttggttttcatttatcatttaatctctcaactaacccagaaaacaaaacataagtttctcatgttcttaccttgcaagttgcatccttgagctggtcattcacaggatattttcttagaatttatttttctggctctaactgcgcaattcagatttcaggatattttgtctcatacctctatttaggaggaattatgagaaattgttagctaacagtgaaagtttcattagaatcacgaaggacttagaaaattgtcacagtgatgtgagttctggcaactaggaatagcacacaaggagaatgaagatttagaattcatcagtgtttctccaaagactttttcagttataaaaatagcttctattctattggtatattaattatgcaaatctacattgtaagtttgtctatggaattccattcatctcttctagctactgacacttttacttgttgctttcactctgttgttacatggtttcactattgaaatattaaagattgattctcttttttgagatagagttttactctttcacctaggctggaatgcagtggcatgatcatagctcactgcagccttgacccatgcccccaggctcaagcaattctcccacctcagtcagcttcctgagtagctgagactacaggtgtgcaccaccatgcctggctaattttttttttaatttttatttttagtggagacaagatctcactatgttgcccaggctggtttcaaactcctgagctcaagcaatcctgcaacctcagccccccaaagtactaggattacaagcatgagccactgtacctggccaaagattgattcttatatagtaacattttgataatctgtcatgtggtaagttttgcaatgccaagctctgctagaaatacggataagagttacaatggtactggattccaggcggctgctggaaagtataaatatgtgactttcttatgtctagaatggaaagaactgtataagaagattttatactccttgtctgcttgctgcctcggaggataaccagtgcttcggaggaaaagtagaaggagaaggagagagctctttagctgccatttagctcacactataaatgtctaagagggtaggtgcatagggaccctgaaaatatagatcgaataagtaaattgtggccaatggcactccttagccaaatagtgaaccaagatatcaacagtattttttaggatgtagtgttatgagtacatgtgataaatatgtttaagcgatttctggaatgctgtgaggaaggtgaatggagtgtcagatatataaaattatgaaaaagaaatgtatgctcatttaatgttcctgcctcagtcccttccttcttttctgtttttggaccacactctcatctaccactgataaggcaaataatttcaagtgactcattgtcatcagctcagccacactgcccaaaggtacttgtcatagtatcatgagcacttcatgcagatcgatttgagaaagaactgcccgtttcttttgattctgatctcaaactgaatattaaagaaaaataaattccataccaaggaccctgagcagctgggagagcattccccatctcccctacctcacctctgcctgaaaaatcaaagtaatcttccttccttctattaataatttgttgcttttatatgagtacgtgatttgtaggagaaactttccaaaataaggaattatattaagaaagtggagattctgagttattttatcaatgatatcaatcattctgacttttcagaaagaattctgacttttcatgaaattaactgatcttaccacatattccatcaccgagaagcagctgccctaattgaaaggcggaacactttactgaagaccaagctagagccctgactgggagacaacagcatgtatgctaaacattttcttctctccctacatcgtattttttatctgatatacaagctgttggaaacaaactttataatttagtgtaaaggtaacagaattttcaggctgggtgaggtggctcacagctgtaatttcagcacggtgggaggtttaggtaggaggatcacttgaggcaaggatttcaagaccagcctgggcaacatagcaagaccacatctctacaaacaattaaaaaaattagccaggcatggtggtgcccacctgtagtcctagctactcaggaggattgcgtgggcccaggagttcaaagttacactgagctgtgatcatgacactgccctctagcctggatgccagagcaagatcctgcttttaaaaaaaacttaggaaggactgtcactgaatttgaagaattattaatataatcagtgatgaagtcaatgacttttgggattgtgcatcttctcattttggagaaaggatgaaaagttcttcagttgcaagatggagttctgtatcttgaaggagatagaggaatagaattattttgttgttgtacatgtttcaaatgtttgtagaagaatgtgtgtgttgcatagggaagcttgaagtagttgaaggtatcgatttattgactctcagctccaaattcactccttgcctcttctgtgaaggtgaatctggaaccttcgaccatttttctttgccagttgacacaatgttaagctttgtagtagagagtcaggaagaaaaagttttgctttctgctttccatgtgctcactcatcaggatcctgcaccatgggaggcacctgcagtgcacagtgccctgcagtttcctccagaacccccccattttagggcgattctgtgaaagagatcctgcagtgagacacctccctgtgaacagctttccccagtgtcctagaggatgattttctgccatgttctagagggtgaatttctagcaagttctgctgggacagcaccacagcaacttccctttcatccagtgagccacagctgtttcttttcaataagatctgggtctcagccctgagggtggggctacaggcctcttccctggttatcctaccctgccctaggagtagaggctgcaccttatgtctgctattcctacaggaataggaatagcagaatttcttttcttcatattattcattctcttgttactctaatactctgtttattaatccttaaatttttttctgttgaaattctatggtttctctttcctgattggactcgacttagacatgcaccaaggacttcaagcaactggagagcatcttccatctccccgcccactcctgcctgagatatcaaagtagttttcttgttttatttctctattgatttgttttgcctgcttattgttttatttacattgttgttatataattatgagaaaattttacaataattttattaagaatttggaaatattgttaatatattaataaaattaattttactattaaaatttttgtgcacattatacacagaatgttattataccattggtgcaaattgaaatcaattttaaaaggtttagcatactgcacaaataggcattaattcacctatgaggatgtgtctggagatcgtaattctaagtcatttttcttgcatgtaactctctcaatacatcattattttttgattttctatttccttcagatggaggaagaagacaatgataattgcaaaactatctgtagacagaatatttctgtcaccccagaaggttttatgtgtgcctttctagtcaactcaccttctggaggcaatagatgttcttatttctatcaccttagatttactttacccattgtagacttcaaatcaatggaatcatacagtagttactcttttgtgcctggtttctttcattcatcgtgttttttagattcccccatgttctcatgtatatcagtcattcattattgctattgctgagtagtatcttattatatgaataaagcacaatttgtttatccattcagctgcgcacaccactgactggacatagaatctttcagggattaaatctttggtatcattcttaagagtgcaaggtacagttgttctagatttttctatcctgtctttcaagggtagggcgtgtctctaaaatacttcagttgaaacatgtatcttaaatacctttatttaaaaaccaatttctatcattcattatggtacctactgtatcattagttttgcaaataaaaacccaacatctaatattccctatgctatttagcaaagctttgggtattatccaagctgtgggtagctgaactgtagtttcctctgttgtggccttacgtattaataacaacagtagctgaccaccctggaatttgctttcctgactaagtcaattgactctccttagagttgagacttaactagtacatatccaatattctctggcttttgtcgaaaagatttaatgtaaattatacatcctaacactgtgatatatttatttttacttggtaactgatagatattatgaacaaaatttagatcattgttcctgcaggtcctgaagatctgtaagtcatgtaattataatccttgctcaacagttattctagagaacttatttaatatttagaggcactttgccctttacagtacatactaaaaccttttaaagcttgttaggtaacttatgaagaaaatttcactaatctattatttaataccaaatatacagcatatacaatacacattttcaatcttttaagcacattaacaaagttctcaggatagttggatctctgtacacagttttttacaggaatatctaagacaagggaatacctttatttaggacacaaatgcgccaaaacatgggtataaaagtagaatgtggccaggcacggtggattatgcctgtaatcccaacactttgagaggctgaagcgagagaatctcttgagtccaggagattgaaaccagcctgagcaacagaatgaaatcccatctctacaaaaagtaaaaaaacatcagctgggcatggtgacacatgtctgtgatcccagttacataggaggctgaggcagggagtattgcttaagcctgggaggtcaaggctgcagtgagccgcaattgcaccactgccctccagtctgggaaacagagtgagaccctgtctcaaaaaaataaataaataaaaataaaaataaaaggtagaatgttaaaatgttgaagatagtttatatgtatatttataacttcatattgttttttgtgatatgtcttatataataggaaaataaaattgacctttatattaatattctaaggctggcataacaaaatatcacagactaggtgacataaacaacataatttattatctcacagttccacaggctagaagcccaagatcaagttgtcagcagggttaatttcttctgaagtttgcagatcatgttgccttttcattgtgtccttacacggtcttgcccctgagggtacgcatgtctgtgtccaaatttacttttcttataagaagagcagtcatattgaattagagtccacttatgtgatgtcattttacattaattatttctttaaagagcctattttcaagcaccattacgttctgaggtactgggggtaagggcttcaacatgtaaattttgggttggatagagctcagtccataacaactctccaagtaaatattacattcacaaacaagacagttgaaacctttctttgtgcaatgctttactaacttctcgtgcacacaatgatcgtgtataactttgatggagattttcctgtattgagtttctttctagaggaaggagaaatgtgcaattacaaatacagatagcttataaaacattgcaaaagaccagtgataaaaattaaaagctgtttttcagacttgccttctttttcctctgctccactggggtgcagaattctctcatgtttagatttgttcttttctgaagataaatcttaatttctccttggtattttatctctgacagttttcctttctttccccattctgttttctgtctgcatgttactttttttttacctctgtcttatcgtttgtctaatattagattctacctgtgcagaagccaatttagctaacttgctgtttttctcctgcactcctcctttaccacctcatcagcagaactgacatttaaaaaagaaaaaagaattgaaattcttttgaagttgtttagggcaagtgaagcgggttaagtggatgaggaaggtggctacagtccttaaacacaggggcagcaggaagaattccatcctatatgctcagctttcttgaggattgttttctgtttttttttcaagtagtatgtatcaatattttaaattttgattcaaccagataatcttttttaaaaaatatatgctttggttgctgacatgcttggattcattttaaatatatttgttttatgcagcattctcttgatttttttcttatttctttttagcctggcttctcttgcattgataaagtttgatttttcttcatactgctttgaaaatgtaatgtgtatttctgttatgataagtacccttgttatataaatgtatgtatagaaatataaaatacatatgaatgtatgtatatatgtgtatgcatatataaatctaatttttatgcccaatgttattcttttttttccctcagtgttattctgtaacattttgcttgtatatcccagtccttctcctttacctcctgctgacttatgaattttagaattaccttcgtggctgattggaagaaactacacataagctatatacatcaggacaataatttcagtaagatattatgaaatgaacaataaactatagctccaatgtacattaagaaaagtaataaaaaagaaaagcatctgacacaataattgcaacatgaatttgctcccttcatcctcagagccattgtccctgatcttccttctgcctggagtgtttttcaccattagccacatagatcccttcactggctcatagtctttgctcctggagaaacatgggaacatgtgaataaagtagaatgctcaaaaagtttattgcagcattgtatttcatagttaaagaaaaatcattgtattagtccattctcccactgttataaaaatgctgagacatgataatttataaagaaaagagatttaagtggctcacagttccacagaccatacaggaagcacagtagcatctgtttctggggaggcttcagggagcttttactcaagatggaaggtaaagagggagaggccgtcttacatggcaaaagcagaacctagagagaaagggaaggtgctacacacttttaaacaaccagatctcaggagaactcaggactgtagcaagtgggaaatccacccccatgacccaatcacctcctaccaggcctgacctccagcactgggtatggaatcctgattagggaaaaggagtcaggctagcaggaccaggggaaagcaaagggataaagaaaataagctataggtctgcctttttttcatggtccaggacatataaacagaaagaggaagcagataagctataggtctttctttatggctcaggacctatagctctcctgagcaaataacgtacataactcacagacttcctgcttatcatcaaacacctctatctatcatcaaaaacctcagttgacagaagaatgcaagttagttccttgctaccttggcattaccagtactgcatgcagcactcggcaacccaaaaacatcctataaaatctccagcaggcctttgtttccttgccatcagctcctcttcggctgattgctccctggcaactactttcatactttctttaatagatctgcctttctttatctacaacagtcttggtaaattattttatccccacaccaccagcccaggtagtcatcactcacctgggacattggggattacatttcaacatgagatttgggcagggacacagatccaaactatatcacacatcatcttaagtcttcatcaatagggagaggactatataaaccgaagtatatctctaatagggtgcaatgtagcagaagttcccgtatgtgttaatataataagctctgcaagatatattattgaatttatagtgtgagttacaaaaaggtatacatgagatgcatcatttggtattaaattttaaaattataaatgaaatactatttattttcagcattttttgtatttagtacatgtatataatgctatagtaaaacatttggaagtatcaactccaaattgataagatgaagggagaattagggtaacgagtgatgaaagaatcagaactgggagtggtagtaaaagtggattttcgtctacctggtatgttgtattacttttaataatttcaaatgttcatgaattctttataatattaaaccaataaaaagtcataaaagccatcataaaggtttatccatattctattctattatcctcatgaaaaaggagagaaagagggaaatgaccaccctttttataaggtcttgtccaaccttcctaagtatttctcccacctctgggatcatatagcttttagttcacattctgcttaggatcccactctttgattctattatagacatgtgtagtttcgtactcttcagtagattatgaactaatgtctcatcactttttacatactcttaaaacctaataaattaatcacttatggtaatacttcaaaaaatctttttggattttctaaaacaaaatcagagaattcaaataaatagcgcaagatgggaattgtcaaattattttaagatattaatttccatgaagtggcattttaaaagtggtaattggttcactgttaatccccattcagtctaggcagctatattgttttctgaccgcctccatttccttcataggaaacatgaagtgaatggggctgtgtgtgtgactactgaggagttaagttggtgcaaagtggtctttgttgatggtttcagtccactagggggcactctaggacttccgaaatgaagactttttctgatggtctcagcggacggaacaggatacaaaagggcatgtgagtcagtcaaatcacagataacagggagctggggcggggtggagcgtgatgtgtgtgtaaggttcatcttaggttttcagctctgacattctatataaaacctcagaaagctggagttcataggtctataaatccattgtgaggatgattctgtaagcagaggtaagggaattggagttttactgggcattgcgagcatggatgttcattagaaaacatcttcattccatgttttcagtttctaaatttttatgattaaaattcatgaaattcactgacttggaaattattctaaatacccctgatatctgatcttttcatatatcttctctgagactagaaggaaaaagaataaacagaagagaagaaaataggaataaaataaggatgaagaacagaaagagaatagggaggggacaatatttaatttgaccagcaatatgtggcctgatgagaacagctgtgagggcctgcagggtgtgtggggaaaggtctgggaagaggaaggggagaggtagaaatgcaattagagtggatatcatacgcacatcctatttttcctctaaccaaccaacctctagttggaaacattttctaatgccctgatttcaagaaactatttatttctaaatttgcaatgcatgctatcaaatagttttcctttattagaattttcatatatttgaattctccaattttctgtcaaactgtgtaatttgggaaatgggatctctcttcccatgactctttaaagctctatttaacctagctgagacacagattcttctgagaggtatcatcccccttcctcacatactatccataaactagtcttacataaagtgcttcttttttttaaaaaaaacctatatcttcatacattagaaatattgcctcttcctctcgtgaactattcacacccatgaatttggagagattgctgtgcagtctcactgggccactgtgggtggtttcctcttcagatgatttttaaaacttatgtttttaaacttaaaaacttttaaataaaagactgatcatgaacattgcaataaggcaagttgaagagtacctgaatccttcaaaaagtttagaaactctagtattgaaaattaatacattacaatttgaatatctgcaggtttcaaaatagaaattaaatctaagtgtagcagcttgatagaaaggaacattattttcatgcaaagttttgaatgacccagttatcgacatagaggctaattttcaaatcaatttttcttataattgaagatacaatgataggatgcacaaacaaacatagtgaatcatatacatatcatgaagccactttgttacttttttaaacaaattttttttttaagagaagtggtcttgctctgttgcccaagctcaagtgcagtggcacaattatagtttgctttagccttgaactcctgggcccaagtgatcttcctgtctaggtctcccaaagtgctgagatcacagaagaccctgtctctgcttctgaaggagcccaaggattggttagggtaagctcagacccactagattgcctgtgggtgtgaaaatggtcttgggagttccttgatgcaggataacttctgcctactcccatgctctatgctgtacacaatcagtcctcagtaaatatttgccttgttaaatagtataaaagaattttagacctataaaagcatttagaaaccttttagttcaacttcattttataaacacagaaactatatccaagatgccagtatgaaaccattagatagtaaatgatctagcagtagaaagaaactggatttcctcccttcctccttagcttcttgctcttgcctattcctgcaggcacatattgttgaacaaagagaaactatctaatggcagccctgccaggttgacctctgcattttggttccgggaaaggcttggttcaatcactttgaccatgagaacggagagttccagtttgtgtaaacatttaccactttgggcaagaaagatattcaggctgagccactgttattctaccaggaaatccagtccatgactcactggctgctgtaggagtgagccaaacatggtggtgccaccctcaacccccagaggtatttctaaggactttcctaaaaatagtaagatatattcattatgctgggtggatattccttgaaggaaggatgtggacatagtgagcattactctacattgtcaaaaaataataattagaatagggaagctaagggtaacatgtcctcaagtggttgatagttcataaaggtgtgagaaaatcttttctggaccaacacattgacaatgagttaggtaatattcaatgaaataatcatagggttgggaattttgtccaggggatggccatacctaaggcatagttaatatgtggaatactatgatccatatgagtggtcatatttagaccattacattcagttcttaatgctatactcaaaaggccaaatattgacctaaattatctgtcaccaaaaggagggaaactcatccaataaaggatttgagaattatattgtatgaggaatgagtgagaaaagagaaaatccttagaatggagaagttttacatatgtaaaaacacacattttatgtatacatatctatatttatatgttttagttgctatttttcatcataactgtccttacatacttaagggtgcaagatgtgaataagaaattatattcagtctttataattccaggggcctagtgagtacaagtcacaggaaatgcacttttcttctggaaaccagatagtcttggtatctgaggaaccatttcccatggtcacttatttagttttgcactctccctcctagcagacacaggcaatattttggcttccatagatttagttttatggaagtaatcagaacgtatcaaaaattaaagtagataagcaattttttttgcaagaagagataaacccagaaatgtacaagactgaaggactttatcaatatcttagggaagaacactgtagtggagtttgggagaaaaacggcagatatggaacctgagctagcaatggctaaggcaagagcagtccatgccagaggagttggctcatattttagaggcaagttccactgaagatatgagtcaatcattgtatttaaggacatgccatattgatatcattcattttggtatcagaaaataaaagcaccttaatagaaatttacatgtggtttcatttttggagcctgcagcctgatgttttctgagaatttctccttgttttttctgcactttgcagaatacaagccacatagcaataggaaaaggtttcttaaaacatgccagatttctccttgcaaaccagcccaatctatgggtcaaactttcctattgttggagtatttaataactcatggaacttgttcccttcctcctttatcattgtactttaattctttaccttttattaaagccatccttaccaaagaaagattccacatttcgactgttggtactgtcaagtctctgggaatagaaagtcatggggaagaccagtcttggagaagcagagcctgagataatatgcacgtgaaatattgagtagtcctctctctcttactcttatctttggcttacatattcctttaagaaagagtctttctccataacaaacaaatcatgatgaccgatttgactgcaagggaatgtattacttttgtttgtccaggacagtgaatcatggtgttttcctgatttcaaacatgtaaacttggtgcatcattgtataaacacctgcaacatctacctctttctaactttttaacaatgactcattagtttgcataaatatcaatcttgatatctacattcttactgtgaacttcatctcagagtgaagactttatttgtttgacctattgctccttttgtgcatctgagtccctcctagggttatagaaaaacattcaaactgcaagtttagtagctacgaatgtgaccacaagatggcagtgcttctctgctgatgcagaacacacagaggtttcattttagtggattctgattaaataggtttatggcagaagtagagcctttttctattggctgagtagacaatgtgagaaaccactatgattgttagaggaaagaaaggaatacccgatgatggaagtagctcttatggctggagattgcaggtttatgactgatcctatttgggaagaacaatgatggcaggcattcgagctttatttatgtacttgtggctgcagctggactgtaagtttagagttttgggtaacacagtatattagttgatgattttgagacatccagggggaagtcttgctttatttaggcttcctctagttactatagaaaaagaaaattctggagaataataacttgataaacctttctctttttctttctgcacaggggtgagcagaggagagagtgtggggctgcatcttcctaccctgagtgtccaggagggtgacaactctattatcaactgtgcttattcaaacagcgcctcagactacttcatttggtacaagcaagaatctggaaaaggtcctcaattcattatagacattcgttcaaatatggacaaaaggcaaggccaaagagtcaccgttttattgaataagacagtgaaacatctctctctgcaaattgcagctactcaacctggagactcagctgtctacttttgtgcagagaatacacattgctttccaggcatctgtaaccatcacccaaacctgagatgggaggtgaagcagcatccctttcctttgcaataaattttagttatagcacttgtcattttgtttgttcataagtggaaactaacatatagatattaaaaccatgtaatgaggttagattcaaagtgacccagaaaggtttagagcattttgttggccagttgatgcttaatggattccgtttttcaaaaaaatatatggtacgcatttaagttaacaacatgaagttttgacacacatgtacatagtaaagtaaagagtcagctaaagagacgcatagggcaaggtatgggaaaaatggccctgagcttccatgccttctctggctctgccacccaccacgtgttcagcaatcaggaggttctgctcaagggatccttacagagatttagtgatgttggattttgtaatctagtcttcaaaggtgactttacatttgctattcagacttctctcctatgaataaccccttagtgtcaatattgcaatccctattatggataaattttaacttttagttttcaaaaattgcttttgttatctttttcttattgtaaaacattacatgccaaaaccagatagtgtaaaatataaaaaatacaaaattgataattctgtacccagataggttttgctaatattaggttggtgcaaaagtaagtgctgtttttgccattaaaagtcatggcaaaaataacaattacttttgcaccaacctaatatttagatttgtttcttgatagagtcctattataattaggatcatgattttttcacctattcttatatctcgaattgagcttttctcacttcgtcctctcctcaaacacatgctttttaatagctccgtgagaaattttcactagtcacagttatttttattttcttactctctgtatctgtggtaaaatttggcagtcccttctacctgctgtttcttgttgggaaaacgtgatgagttttcctttagagtctagtttggacatatactctgtgtgtgcgagggaaattaaaacaggaagtgattttaaaatgtgagcttcagattagagtcatcagtatattcttcaaaatcttattggtatctcttcatatttactctctcacataattgagaagagttatgttttttaatcactctgtttctgcagaacctagcataagctttttcacattgttaataatcaatagatgtttgttaaagaaagaaaaaatggattaaactattgtatattcaaaattttaacttaggctttgtggttgaattaaacgtataattttatgtgtgaataattaaactcctgaaaatgtatatttgaataagttgaatatttgagagcatatttctttccatttatctatgtcattcttttccataaaactttatcgttttaagataattaaatttttttctagacatttcatttttattgctacctttatctttctttctgaggtatgtggcaatgtttttaataaatatttttcagctacattattcaattcttattagtaaattgcaggaggcatttggatagttaatttatgctaggttgttccaaataccccgcctcactttcgtgttttgactgctttaaacattacgagtgcagtttccttttcaaaagttgtatcttttcgtgttgttgataaaaataatggaaataaagaagttgcataaataattaattccctaattctcccacctgtggtcaagagtaggctaatttcaagatccctcatattattcctaaggatggatataaccggcgattggtagggtgagaatgatcccttctggctgagttatggctgttagttattagctaggtcttataggaaaagtcattagattaaattggggtttaaaaacaactgaacaaggaaggtcagtattgtagcccagtaactcaactggcttttgttatttccctgtctataccactagctcctctccggagaagcaagctgactcttgatcagtccatttcctccaagaatgaaatggagtgattgggaatcatggcttatagtctatttattttttgcttgtttagaagaaagagtgtaattgctattggcttaattgctgtatcttacttggttgtcaatttttccaatgtaagaaaaaaaattatccagctagagtgtgcaaagtcagtacccagcttagatccagacacattcaagcattaaactttaaatggaaaagagtactgatgaggagagacattagcaggtaataaaatttactataaaattaccttctgaggttggcatacaatgaaacagatcaatggagctaaataaaacacattgaacaaataaaccaaggtttatgtatttttttgttgcctctgtacaaacttgctgtcttaaaacaatagatacatatttttttaaatcatcttcactgggctgaaatcaaggagtcagtaaggcccgcttcagaggctgcagagaagaatctgttccttgcctcttctagctctgccagcatttcttggcttgtggtgccatcaccccaatccctgttgctatggtcacattggcttttcttcttatgttgtcaagaacacatttccacaagttcaaaggcaatatttctttgaaaatttttttgaataccaagtcacccaggtttaggtaaagtaaaagctgattaaatgaaaggccaggaaggaaaacctgtacctgttggttaaaggactgaatataatgagtttatttatctattaatagttaagtgtgtcagaatggaatatgtgtggttcagaacattctgagtaatatgggcctactagtgaccagttcatagtgagatgacacatgactttgggatggggaagaatgcagggccactagagctaagggtaataatgctttaggccacgggagttcacagatgtctgatagggtaactaattttattcttaatagtcatacattgtttcaacattttcagaggaccaggaggtgataagaaaagcagtttctgagtgagagcaaaaccttacataactgtcctagaaaaaacatgttcctctacatatagataatttgattggcacagataaaaaatggaaatcaattgatttagctattgtgagtgctgtatctttatgacaggtgagtgcttcaacccatgtagaaaataaaacaactcttactagtgcatactcacaaccccttagggagtagaactgtctaaaacatactcaactgttcccttaggacagtattccagttcatattccacttttacagttttcatggaattttggagcttccaaaaaagacatgaactgtctgcattccctagtattctagaaaagtctccccacaaatgtttaatattgcagtcaacatgtccctactgcgatgggtggtccctggagggtattaacaagtgttcattggcaatcatctggttccaccaaacagcctttctggctttgatatatcttatcctcactgatcaaacaaatcaataattcatctaaggtggagttattgacattttccatggatgcatctttaagttccataagaggtgcttgcataaggactttagtcagaaagccatgtttagcatgatcccctgctcacgtatttttttctagcttctaaagtgcctttcatacatggaactttgtcttcattaggaaatttatttcaatagcgtcaagacatcaaataatttatgtatttggtgtccatttttataaagatacatgaaatatatgagaaggttaagaagaggtaaagaaggttaaggaacctcatcggctccattatatttggaagttgtgacctgtgttaaagcattgactatcactgcttatatttatcataatttggcatgcaaaaatgagagtcacaatttcagctacttgcattaattttacttctaagagattgaattttataatagagtcgggtagttattacataaaaagttttgcgttattccttttcaactttgagtttaatacattaaaacaattaattcagaagttgatatgagactgtccaaaatatctgtttgagtgtggacacttcttaaatgacaaaagcacagttaaaagatttattgattgagaagtgtaatggagttgaacactatgaagataaatttgtaatatttcataattactccaccaactggtagaacaaataatggatgcttttacaaaatagataacttgtactgtatgtgatatcataagatatctgaagacgcttcaaccaattttgacaagaaagatctgaagacgcttcaaccaattttgacaaggctaagataagctattttaagacaagagcgataagctatggctactatattaataaataaattatggtaggcaaggcaatgacctttgttgtttgcagtgttgttgagtagtatcactagggcatggtctttaatgtttacacagaaagaaaatttgtcacaatcggtgatcctgtaatcagttgtcctgtatatgggatcgtccagaacacattctcttcagagcggggcatacagaacggcgtggcttgctggggcttatttggggtctgaattgaagtcatggaaaaaatataaattcgaaggtttgataacctaataaccaaactctgtaatctaatatgatctgtatgaacagagctggctgttgaaactgaatagaaaagagaatgggacctttaaaacacaacttgatatctgaggggttaattctaaactcttcgtcaaagagagattcgtttttctgctgtttggccccaagattggcaactggataggcattggaattgaggaggaatactgttatatcaatagataagtcaaaagatctgcagagatttgtacaaaccttcttatcataacatgatgtatttgtactttaggagaaacaacaacatacatagatgtgaggctagaggattattgtatcttacattgtctgtataattcattacaggtatcaaatatgtgtcaatctcccagttccatcacaggtgcaatgataaaatacagtagttggtcaaatgatcatttttcctctcaatgtgaccatgtttattttcagatttgttaacaaattaagagttggttgatccaaaagaaagtctgcattgggtgagcttctcagccagtacatagagaagtgtgaggtgacacacactagtttgctataccaggaaacctctgtttcctgttctagggcagcagtagcagcagcacatggcccagtaattcttctctcaccatgccaggttcacctcacagtacagagtcctgaaaataaagaagaagatttttttttatctagaaaaggaaccaaacatgtcactttctagcctgctgaaggtggtcacagcttcactgtggctaggtacgggtggcccagtgggaatggactttctgtatgaactaaggactttggaagtatctttatggaaactttgggaaggaggggtaatggggtacaaaaattgaatttctttgtcccaatccactttatccttaaatcttcaaattctatcttttttccttcaggacctggcattgcccagaagataactcaaacccaaccaggaatgttcgtgcaggaaaaggaggctgtgactctggactgcacatatgacaccagtgatcaaagttatggtctattctggtacaagcagcccagcagtggggaaatgatttttcttatttatcaggggtcttatgacgagcaaaatgcaacagaaggtcgctactcattgaatttccagaaggcaagaaaatccgccaaccttgtcatctccgcttcacaactgggggactcagcaatgtatttctgtgcaatgagagagggcacagtgacagaactgtcggagggaggtgtacaaaagccctggggacctgcttgagacctccacctgctggagaaccaaggcgggaaatcaacatcacagacaggaagtggctacagctgtggcagcccagatgcagtgttgtaggaaatacactcaactctaagaaaatacctctttaagttcatagaccatgatcaaagttatcattaactaaaaactttcttatccctgaatctttggtttaaagtttagacataccaaatttgtgactgaagattgaagagaaaaaactgccgcaataaacaatttgccatttggccactaaattgaactggattcaaaaacatgtgactgaaaaatcatttaaaatctctgtgaattttcacatcaatttgttcagtaaatactggagatctacaaaaagttcatgaaaaatatgtattataaaaactatttttggatttcaatttttttttgcaccaaaataaacttacacttaaattgctataacatatgtagacagaatctactttgaggcactaagaaaaataggacagcaatttgaaaagaacccctattagagcaacagattctgctaaaatgaagcaaaagaaagcgtcacatttatggtgaagggtgggtagtagaatggtgaaatcatcaattctctatgaaactttacgaggtcagtgctccaaataaatcagcagtttgcaagtggataactcattttaagaagggatgagacaatgttgaaggtaaatcctgcagtggtagaccatccacaccaatttgtttggaaaaagttaaccttatttgtgccctaattgaaatggactgatgattaacagcagaaacaatagccaacaccacggacacctcaatcggcccagcttacacaattttgattgaaaattaaagttgagcaaactttccattccatgggtgccaaaaccattgcacctagatcagttgcagacaagatcagagctttcaataaaaattttaagcaagtgggatcaagcccctgaagcatttctttgaagagctgtaacaagagataaagcatggctttaccagtataattctgaaggcaatgcacaatcaaaacaatggctaccaagaggtggaagtggtccagtcaaagcaaaagtggaccagtaaagtgcaaaaattatggcaacagttttctgggatgctgaaggaattttgcttgttagctttctggagggccaaagagcaaaaatatttgcttattatgagcatgttttgagatatgtagacaaaactttaggagataaatgcctaggaaagctccaccagagatttcttcttcacgatgacaatgatcctgctcactcctctcatcaaacaagggcaattttgtaagagtattgatggaaaatcgttaggcatctacatagccttgatttggctccttggacctctttttgtttcttaatgttaaaaaaatctttaaaaggcacccattttcttcagttagtaacgtaaaaatgaactcattgacataattaaattcccaggaccctcaattatgcagcaatggaccaaatggctagtatcactgcttacaaaagtgttttgagctcaatggagcttatttcaggaataaagtttatattttttattttaattttactttacacgaaccttttgaaatctccttgtatttattgtgttatagacattgttttaaataggaaaggcattgaaatcttttatatttcccttctaaatatattatgttgtttatattgtttaatggattaatttgatttaggtttgtttgctgtgagtaaatggtacttaaacatttattttctaaaggtgtctactatgtgctaagagctcctttcatcttattaacaccttgaatgtggaagaaatcagtctccatactacagatttacctgcctctcaacattcctatccatgaagtgatcattatttagtggcttccagaaggacatgtggagaatgttcctcacagaggcacaaaccttttcatttatatattaataagacatcttttcttctaaaatgaatcaccatttttgaaatatatgaaatttccctttccctataatgtttccacatggtttatttcgttccactgatctatttgtttcactctatgacaatctcagaatgtagttttatagtaaattttataatctcttagggtaaatcacttttcaccaaaaatctttttcaagattttaaaaaataattcttgcacatttacttttcagtatgttaaaagttctgtcacattttcctcatgttcaatacccttctattaaactgacaaaacaaaaatgtctaaaaaccagacagttgaaattgcatttaatgaatatgttaacaaatatcaacttgttttcgtatgtttttattcagaaaaatgatattttttctaattgtaaaggatcttttatgttctctattacattgtgaagtttcttacttttatcttcatatggatttgtatataactgttcccacacgttcatctatatatatgcattttaaatgaaattatcttttatatattcatttttactgatattcccagtacaaacaaatgctatttaaaaatcatcttggttatatagctaagagtttctaactttaaagtacagataatttgcaatatattcatactacttgaaccattaaagtttattttatgaacctagcctaaccttaacccaacacctaaaaaatagcatgataaaaatatttactctccaatttttttttttagacagagtctcgctctgttgctcagactggagtgcagtgccactatctcggcttactgcatcctttgcctcctgggttcaagcgattctcctgcctcagcttcctgagtagctgggattacaggcgtgcgccaccaccacacccggctagtttttgtatttttagtagagatgaggtttcaccctgttggtcaggctggtctcaaacttctgaccttgtgatctacccgcctcagcctcccaaagttctgggattacaggcttgagccaccaagcccagcctactctcctattaaaaagtcaagaaacaacagatgctggcgaggctgcggagaaataggaatgcttttacactcttggtgggaacgcaaattagttcaaccattgtggaagacaatgtggagattcctcaaagacctacagccagaaataccatttgacccagcaatctcattactgggtatatacccaaaggaatataaatcattctattataaagatacctgtacttgcatgttcattggagcactattcacaatagcaaagatgtacaatcaacccaaatgcccatcgatgatagactggatgaagaaaatgtggttcatatacaccatggatactatgcagcaataaaaataaatgagatcatgtcctttgcagggacatggatgggggtagaagccattatcctcagccaactaacacaggaacagaaaatcaagcacctcatgttctcacttataagtgggagctgaacagtgagaacacacggacacaggaaggggaacaacacacactggggcctgttggggagggaggcggagggaaagcatcaagataaatagctaatgcgtgtgaggcttaatacctagataatgggttgataggtgcagcaaaccaccatggtacacgtttacctatgtagcaaatctgcatattctgaatatgtatccaagaacttaaaagaacatatttaaaattcattgaagaaattgaacatatatttgcaagtgtcccatgccaatataaaacacattataataagcatgtatacatcttattaaatcagaatgaatatccatatattcatattcatataacttgatataaaatagcagttggatacatagtattaatttaaaaattctagttttaaaatttataattttagatttttaatttaaattttaaatttcaaatttttaaaatacctcattttatttctgatgtctggaatcttatttagttgaaaatgtctctttgaattctctgagtaccatgagcttgtatagcttatgctgctgcctctaatgtagctgctattgttttcaatatggaatgaacaaggtgattggatttcttgaaccacttactataatagaacctctagatatttctaccaaataaagagtagagaacaaattaaaatacgccaaatgtatttttacagctactttcacatctattagatggagtctttcatagacattttatgaaagagtttcataatcctcacacttgttacaacatacagtctaaacaggcaagatctattcactctaacataatatctaagggatggtgtgaaggatattgcaagcatatacacacacacgcacacacactcacatctcaccacaagttagagtttacagatagcggtttacctttgaggtagttagagagaaccagtaaagaagtcacacatattcagcctaataagtaatgagttcaaatctaatagaaatgacatctaaaattggaatcttagaaacaagactctactaaaagataactttggaatgcaccaaaaatcagttttttaattgagaaatattgcctttcactaactcttcagtcattatcattgtatttcttggcatctacatctgggaaaacctttgtaaccacaggtaaaatgtaatatggaaatggtcactctaccttagtttaataaatgtattcaattgtcaagtgacagaaaatttactcttgaatagagatgcaaatatttaaattaagtaattaaaacccagaaggcagtgtattaacaaaataatgcagcttgatttttaaaaagttattattattattattttttttattattatactttaagttttagggtacatgtgcacattgtgcaggttagttacatatgtatacatgtgccatgctggtgcgctgcacccactaacttgtcatctagcattaggtatatctcccaatgctatccctcccccctccccccaccccaccacagtccctagagtgtgatattccccttcctgtaaagttatttattcacttatatatccatttatttttaaaaaatcattcagcacctacagagtgacaaactttgtgctgagaactcagtccatttaacaatcttattgcaatctctagcatgtaatagctcaatttctatactgtaggtttacctgccccataccagatttatccataaaatgattaataaattagtggctcttagagggacattgtagagaggcagaatttgaagtctttcttttctctgcttttgtgcttcattttacccctctttcaaaaacatttaatgccatcatgtggatcaactttgcacacccccagacctgttccaccatccaaaatcctcattcttttcaatcttctccttctacctccaacaccattttctccttccctaagctttgaatggtaatggttggttggtaagtgatcttgtattgtaacatcctcttgtatttgcatttgaaaagtagatgtgtatagtataaatcttaaagagaaatatgtttaaaaatttttaaaattatttttaattgtggaaaaatatatataacataaattttgccatgttaaccatttacaaatggacacttcagtagtgttaagtacattcctttgttgtgcaaccatcactaccatccatcttgagaactcttttcattttggaaacctgaaactctgtgactactaaacaatagctctctattttcttctccacctaatccctagaaaccagccttcctttctgtctttataagtttgactactctaggtactttgtataactagagtcatacaatttttttttgtgactgccttatttcacttagcgtaatgtcctcaaagttcattcatgtcatagtatgaagcaggctttcagaatttccttcctttataaggctgcatattattcaattgtgtgtacataccctattttgttaaactatttatctatcaatggaaatttgagctgtttctatcttttggctattgtgaataagctgctctcaacatgagtatgcaaacgtctcaatatttggggtatatcccccaattctctcaactttagaagtgatatacccagaagtgcaattgctgaatcacataataattctatttttaattttttaaagaactgccaaactggtttccacagtggctgctgtaccattttacattttcaccaacaggacacaggtgttttgatttctccacatttcatcagcacttcttttactatcattatttttgatatgaatagtagccatcctaatgggcatgaagtagtatgtcattatgatttttatttgcatttccctaataattcgtgatgatgagtatcttttcctgtgcttattggccaattgtatatcttccttggaaaaatgcctattcaactactttacccattttgaaatggggtgtctgtctttctctctctctctttctctctttctttctttcaagatggtgtttcaccatgttgcccaggctggttttgaactcccgagctaaagcaattcacctacctcggcctccaaagtcctgggattacagatgtgagccaccgcgcctggcctgggttgtcttttttttctgctgagttgtaagagttctttatatattctggatattgatcttttgtcggatatatgatttgatatttttttttccattccatgggttgtttatccactctgtcactccattaattgtgccctttgatgcacagtagtttttaattttgatgtagtcaagtttatctaagttttcttttgcatcctatgcttttggtattatagccaagaaattattgccaattccatgctttctgaaggctgaaaaaaaagaaaaaaagaaaaagaaattattgccaaatctaaatcgcgatgcttttcctgtaagataagagtgcagtttcactcttttgcatgtggatatccagtttttcccaacactgtttgttgaaaagactttcctttcacccttaaacagtcttaggaccctttcctaaaataatttggttgtaaatgtgaaggtttaattttgggctctctattgtattgcattggtctatatgactgtcattatgcaagcaccacacagcttttgctatattactgtagctttgtaatcagctttgaaatcaggaagtgttagaccttccaaacttgttctttttcaagattattttggctatttggggtttcacaagctgccatatgaacttttggatggatttttctattactgcaaaaacactattgggattttgatagggattgaattgaatctgtagattgctttgggtagcatcgacattttaatgatgttaaattctccaatccataaatatcagatgtctttcaacttatttgtgccttatttaatttatttcagcaacatttttgttttcattgtgcaagtctttagcattgttgtttaagtttattcctaagtattttattctttttgatgctattgcaaatggaattattttcttaatttccaaagtgttcattgttagtttatagaaatgcaattgatttttgtgtgctgtttctgtatccttcaagtttgttgaattcatttattagttctaactacaagcatatttaatggtggaatttcaggtgttgtgacagcagattggagaacaggacatttgtctcatgtccctcaggataactcatgtaggctgcaaaacttcaagcatacatagaagcatcaacttcataatgtaatcattttatatctttaatacatcaggcccttcaaaatttagtttaaatgttgagaagtcaaagaatgatgtccttctaagaataaatattctaacacatgatgatgtgctgaacaagatgaagaatttgtatttggatacatatttttaaagcaatgtttagttagtaattgaaaatactaaaccaggagaaaataatgtgcactctggtttccatactagagagatatagaagcagaaagttttacctcagtccacagttctagtaaataaacatccaacacttaaacttgggtcatttgactccaattgatgaattttcagcaaacaatgaaatataaaagtaagccaattcaatatacaactccagaagttataaaattaacagtaaaataaaatggttgagagtagattgaaggaattaaaaataaaagcaagaaattaatggctcaaaggaaaataacaaaatcaatgataaaaccacaacatgatattttgaaaataattacaatactaacatgatccagaaaaaaaaagtgagaagggacaaatgcatgcacaaaaaaaaacaacataattaagttgaatttattttgggaatgtaaagatgatttaatacttgaaaatctattaatataatgcttgaaattaacaaactttaagaaggccaaagatgttctaatgcctggtttggtggattgtttcatttggatctaggatgattcactgtacctgtgcatttgtgcaagctcatttaatttggttggctcttaaaaatattcggattctttctcttaatttgaccccaattatagatatagtgttattgttcttaaatttcttgttgcatttagattatttctatgaagaaaggggaaaatgataaatttattcaatcatatttatgacaaagttttggcttccatattattgtttttatatttttcttttattgtgaagtgtaccaagttttattttagaaattgctggaccagtaaatattgttcaagttgatgggttgtatagacttcagatttttggaatgttcttgaaaattattcccatttatgtccttaaaccttgcataatcttgtgaaataatgcttcataacaatgactgactgtgcacagattaaacaatgctttaaataatgttagtcattaggaagaattaagctatgatcctgtatgtgagaaattttcatactggttaatttgaacaactatgctttagactcctttatcacaagcaagtttccaggaacagaaagagagtggtcactggccatgaataaagttccagtactctggtggttcacagaagtttaggaactttttcagccttgctaccatgcattgctcatcaggtgtttaataattggtctgaaaggaatgcttatgccactacctggtggtcagctcctaaactgcagtttattcatcctttaaaatatgttttctttcctcttttagtcaaagaatgagacctgaaattatttaattattttaaaaaatttcatttggataaatagagcacctattaacttgctgtcttaaaatatttcaagggcttgggaaaaagtcacgttggtgtcttctaacttctctctgaaatttctctgaaagcaatttatactggaaaaaatagggaacacatgttttgctattaatgagatttatgttcaaaactattaactttgccatgtacttacttgctgaatacttttgtgttttgttacattttttttgtaaagtgtgatagtgatagcttctttagtatttgttgtgagaattcatcaataatgtatcaaagaagattaacaagtagcagatgatctaacaatgagaatattctcaatagacccagaaaaggcatgtgacaaaatccagcatccattcctgattaaaaactctctctaaatgagaaattaaaaggaactttctcaacttaatataggaaacttacaacaacctatgtcaagtgtcatacttggtgaaaaactaaaggcttctccctaagatcacacataagaaaaaagttattgctctcactgtttctgtttaatattgtactagaatgtctatccagtgcaataaggcaagagacagaaacaaaaggcatacagtttggaaaggaagaaataaatcaagctttatttgcagacaacataattgtttaagtagaaaatccaaagaatctgcagaaaatataccagaacaaataagtaagattgtaaaggttgcaggataaatgatcagtttgcaaagattaattgtatttatatattttcacatgcgacaatcagaaattaaaaataaaaacacaataccatttacaatagcatcaaaaatattaaatgcttacagataaatcttacaaagtatagaagacttggtaacttaaagccacaaaacctcatgagagaaattaagacctaaggaatggagagataaactatgttcatagattgatagactcaatattgttaaaacgtcagttctgtttcaattattctacagattcaatataaccacaataaaagttctgtcatttttttggttaaaattagcaggctcattataaaatttactcagaaatataaggcacctagagtagccaaaacagggttggaaaagaaaaaatttggagggataatattatcttacttcaagttgttttccacagtaatcaaaacagtgtggcatttgtatacagatagactaacagattaatagaacagaatagagcccaggaatagacccatatatacatgaacaactactttttgacaaaggtgcaaaggcaattcaatgtggaaaggatagtcttttcaacaaatagtgcttaaataattgaatatccatatacaaaaaaatgaactttgacactctcataccatatacaaaaagttacttaaagtgatcataaacataaatgtaaaaccccaaatcataacacttcaagaagaaaataggaggaaatttttgtgaccttggcctatgcaaacatttcttagatatgatagcaaaacatgacccataaaagacaaaaagttgataaattgaaaaattggttttcattacaacttaaaactgcctctggaaacaattctgtcaacagaattaatagatgagctatagactggaaaaatacttgcaaattgggtatctgagaaagtcatttatttgagttatgcaaagaacccacagaacccattaacaaaaaaaaatagaaaagtaaataaaaggggcaaaagatttgaacaaacacttcagcaaagaaactatatgaatggcaaataggcatatgaaaacatgcttagcatcattagtcattagggatatgcaaattaaaatcacaattaggtactactgcatacctattagagtggggttgacaaggatgtggagcaactgcaactctcaggtactactggtggaaatacaaagtaatataataactttggaaaataattgggcaggttttaaataagtcaaatatacacctgatatccgatgcagccattctactccaagttatttgctctaagagaaatgacagaatacacctatacaaaatcttgaatacacgtttgtagtaactttatttgtaacagcctcaaactgggactaactgaaatgtacatcaacagataaataacaaacacattgttttatatctatataatgtaatagtactactcagcaataaaaagaaataaaccattgtttcaaatgacaccatgaaagaatctcaaaataattatgctaagtgaaagaagataaaccaaaaaaattgtatatgatttaatttgtataaattataaaatacacaaactaatatatagtgacagagaattgcttggaaatgggcatgggagataggaaggttaagagaaaaagtacaaagaaatatgagaaacttttggggtgatgtaaatattcatcatgttgattgccataatagcatcacaagcctatatgtatgtcaaatcttataaaaatgttcactttactttggcgcagttaatttttatgtcaattatacatcaataaaaccatttaaaaatccaatttaaaagtacatgtcttcaacatcacagaagtattctgatatggtccaagatgcaaactgttctcactgggtttaaactatttttcttaagtatggatgacaacagtctacacccatgtgctctactgtttattttcaacccagcatcattccagcttattttgcattcccctttgtatatcagaatagaaatttgtagctgattttccagaattcattttcaacatagttctaggcttgtttctgacaaagtgatttggaaggtggaggagaaggagaagagatttgcaaacccaaacaatatctgggcctgaatttcttaatgaagtctgtatctgagaaactattcatatgctgactctggacgcattctttatctgaatctggggagagtgaactccaggaaacagactgaactaagtgtctgttcttagctatgtgtctaggtataaatgtttacaggtccttgcagaaagttagatccttctcccaaattttactctgataacacttctggaggttttttcttttctttttcattttatttttagatttacatgcggaggtttgtaacaagagtatgctgcgtgatgctgaggtttgggctcctagttggtcacccagatagtgaacatagtacgcaacaggcagtcacctggatagtgaacatggtacccaataggatgtttttcagcccctcccccctccatctctccctccttttggagtccacgatgtctattattcccatctttatgtctgtgtgtgcccacagtctggcttccacttacaatgagaacatatgatattttgttttctgtttctgcactaattctgcacttaagataatggcctctagctgcatacatgtttctgcaaaggatataatttcattcgttttatggctgcatagaattccatggtgtatatgtaccaaattttccatagtctatcacaattgatgggcacctaggttgtttccatgtctttgctattgtaaatagtgctgtgataaatatatgagtgcatgtgtcttttggtagaatgatttatattcctttggatatatagccaggtatgggattgctggcttgaatcataaatgtttttttagttttctgagaaatctccacactgctttccacagggctgaactaatttgcattctcagcaacagtgtataagcattccattttccctgcaaactctccagcatctgttattttttgaattttaataatagctattctgaccggtatgagatggtatctcattgtgattttgatttgcatttctttgatgattagtgatatgaaagattttttcatatgcttgttggccacttgtatgtcttctgctgacgggtgtctgttcaagttctttgtccgttgtttaatggaattatttgtttatttcctgttgatttcttaaagttcactacagattctggatattagtcctatgtaggacgtatagtttgcaaataatttctcccattttgtaagttgtcttttaactatgttgatagtttcttttgctgtgcagaagccttttagattaaataagtcccacttgccaatttttgtttttgttgtaattgcttttgagaacttagccaaaaattctttgcctaggctgatatccagaagtgcgtttcctaggttttcttttaggatttctatgaggtgttacatttaagccttcaatccctcttgaattaatttttgtatatggtgacagataggggtccagttttattcatctgcatatgtctaggcagttatcccagcaccatttgttgaatgagtcctttccccattgcttatttttgttggctttgtcaaagatcagatgatcataggtgtatggctttatttctcggttctctattctgttccatgggtctttgtgtccgtttctggaccattactaaggccaagttttagttacttagccttgtactacaatttgaatttgggtaatgtgatgtctctagttttgttctttctttttgttaaggattgctttggctattcaggctcttttttggttccatatgaattctagaatggtttctactaattctgtgaaaaatgactttgacaatttgataggaatagttttgaatttgtagattgctttgggcagtatggacattttgacgacattgattcttccaatccataagcatggaatgtttttccatttgttcgtgtggtctatgatttctttcagctgtgttttacagttcttcttgtatacttctttcacctctttggttagctgtattcctaggtatttgggggcatgtggctattgtaaattggattgcattcttgaactgactctcagtatgatcactattggtttatagaaatgctcctgattttttaatgttgattttgtaccttgaaacttcgctgaagtcattcattagttctggagtcttttggtggagtctttagtgttttctaggtatagaatcatattgtcagtgaagagagataatgtaacttcttctttccctatttggaggccttttacttctttcttttgcctgcttgctctgggtaagacttctagtactatgctgaatgggagtacagagagtaggcattcttgtcttgttcccgttctcaaggtgaacgcttccagcttttgcccattaagtatgatattggctatgggtttgtcatagaccactcttattattttgaggtatattccttcaatacttagtttgttgagggtttttatcgtgaagagttattggattttatggagtgctttttctgtatctattgagatgatcacatgggttttggttttaattctgcttatgtggtgaatcgcatttactgatttgtgtgtgttgaaacaactttggatcccaggaatgaagcctacttgatcccaggaatgaagattagctttttgctgtgctgctggattcaggatgctagtttttgttgagaatttttgtgtctatgtgcatcagggatttgatctttagttttcttttatcattgtgtctttaacagatttttggtatcaggataatactggatttgtagaacgatttagggaagaatctcttcttgattttttggaatagtttcagcatgattggtatcagttctttgtatgtctggtagaagtcggctgtgaatccgtctggtatgtggcttttttattggtacattttttattactgataagctgcacttcactaaaatttaaaagttacgctcttatgaaatgcaatgtcaagaaaatgggagacaaaatgcaaactgagtaatccattgcacttgaacaaatctttcttgatattttagtttctctccatgtaagagacatatttcagctgcatttagtctgccatcttaccaaaaacaggtttttgttttcttttgttatgttataaaatgaaaactcacaggaagtaagcataatgaagtgtttgtttttactgcagacacttcataggaaaagaccagctttaataatctgtgtaatcatggggacatttttttgtgatgacctcagagtgttatctctgatagttgataaccgtcttggtataggacagtgttcacaaataaaatcttgtaaacaactatcaggctggcagcaacaaaaccatcagggaagtttttaaaaaatgaaaccctttgaatcttggaaattgtggtttgaaatgttggaaatcgtgattcctaaagttagtggtcttgtcccaacatctgtaattttaaatgactcacaagttaattcagttctcacacaaccaggttttagaacctcgattatcagccgatgtatctttatcaatttgtaaagcaagagaagaggaaagttctaactcatgcttcagtctgttgatgcaaatctacatgtggattccctacatcatcagaggaaattgattaaactttggcaataaaatgttggcatatgaccacagtagaaagcgtccttgaggccagatctccagattatagggttaacacttgttgcctgattgtcataagcaagcaacttgtcttggagtcattgaaatcgtgagggaataaactattaatctgaggtcatatcttatcagtaaatgtcagtcactgctctacatgttaggatacagtgctgaaaaacatagactcagtaacagcaagacttcttaacattccctctgatttcaactcaaaacccttgtctgacatcccattgaattataccactggtctgcaatggatacgtaaaaatattggcctgtattaaaatatccaagaaaatggaactctcacctacagtcatactctaggatgctttgctaaagatcttttgtttcaggtagtgtccaaagaacaaaattgacaaaatagaccatagagatgacaacatctgcccttcatatttacaaggaccacctgagactggcatgggccttataaatgaggtcagggttgaggacctatttctgacttttggaaggagtccaggaaaacattcatcccagttcagcccctgtccaccagagggagtggcttcctaacacaaactcatttcctgctatcactgtaggtttcactgtgatttcttcatgttaaggatcaagaccattatttgggtaacacactaaagatgaactattctccaggcttagtatctctgatactcttactgcttggttagtgagatgccttttaaaatttggtctctgtcttctatcaagccaaaaaaatctttaaccataatttgacctaagagcattatgctcaaggctaaacagatctctctctctctctctctctctttttttttttccctaggaagaacccgtggaaattcagtgacccagatggaagggccagtgactctctcagaagaggccttcctgactataaactgcacgtacacagccacaggatacccttcccttttctggtatgtccaatatcctggagaaggtctacagctcctcctgaaagccacgaaggctgatgacaagggaagcaacaaaggttttgaagccacataccgtaaagaaaccacttctttccacttggagaaaggctcagttcaagtgtcagactcagcggtgtacttctgtgctctgagtgacacagtgacagggactgcagggggagctgagcacaaactctgagcagcacggggggcccggctgctgagtgtcagccactgtgatccactctggttctagcacagtctgtggttgtttgtgcctcagtttctctgattgatgcagtaatcatacacatggccagaggagaaaaacaagaaatgaacatccccaaacccagctcttggttagtgaaattaaaaacagacattgacaccaaatagttcctcatccagtgccaaagtaatttcaaggttaaaccacagaaacaatgaagctgtctctgtgatcatccttgcagacaaagttcaacccccacctcttgttccaggtcactctggtagatattggaggtggatgtgttctattacatttttacagagccaaatatgccagagaaggtggcgtctgtacaatgtctctgtaacagagtacagcaggagagatgacgtgagagccacagctcctcaattcagttcaaatgtctatgcaggattcttaatagagaaagaagggaagagaagaaaggaggagggacagaatgtcacatgtaaaaaaataatacggagaagaaagcaacaattgtcagagagagggaagttttcttttttggtaagccagatggtagacaaaggctgatgttccaaaaagaaagggaaggatcaaaatcattattgaagaaatgactcatttgtaaatcataagtattccttgcttgttacattgatcaattggctttctaacaacaagtctttaagtgagttagttttgcagtgccaatggaagattaagcatacagatttatatttgtatccctgtgaaatcctattaaagacacagtaaagaaattgaaaagggcataaaaccacaaaaagaatagaaaaggaggtgacagcagatggtgataccaatacaattttagaaggcaggagtgtatggagaaatgaaaacttgcatagcagaccagataaagaagaaacctgggcccagtgaaagaagacaacaaggaacaccaatgtgtgttgagcctttgtggaaaggtttagaaatcagaagtaccaatgacctttgaataattggtgaagataatgctttgtgtgtgtgtttctattttgagggtatttgaaaagagggtatgaaaagaggaggagaaagtgagaaaatgtataattaattgaccacccatgctctccaccactgcatgtataacaagcaatgctcacttcccaaacccagaagaaagctggaatttaatatttcatgaattgaagtgcagaacacaataacacaagaaagcagaataaaattaaaatgtaaaaatataatagtcaattatttaatataagaaatataaaatattgtttatgaaatattctcgtagtagtctatgtgtttcaacccaattgtcttctagataagtttcactaatttatactatcagtagtggtgatttggcaggatacctattttccttaaaccttatgtattactaaactttttgacattggcttatgagttagaatttcatttaaagaatatttcatttatttatgaattagatggagcgtcatttaatatacttaaaagctatttacattttttgatatattgccatttatatatctgccccccccccttttttttttttaccatttattgtctttattttccacatctaccattgttccaactatgagatactggcaaaccctcaccctttgaaaaattctttattttttaagagcagttttagtttacagcaagattgagagaagggtacagagatttgccacacaccctctatcccttcccagatatatatcctctcccattatcaacatccaccaccagagtggtacatttgttacaaatgatgcacttacattgacatgtcatagtcactcaaagttcatagtttacattagggttcacgcttagtgttgcataatatatagatgtggacaaatgtgtaatgccatacatctatcattgtagtatcagacagagtaatttcactgtcctaaaagtcccttgtgctctggtattcattcatttcccaatataacccctggctacctctgatcttttagtgtttccatgattttgccttttccagaatgtcatatacttggcatcatacagtatgtagactttccacactgacttctttcacttagtaacatggatttaaggtttctgtttctttcatgtcttgatagctcatttttttttagtattgaataatattctattttctggatacatcatagtttatttatccattcttcttctgaagggtattttggttgcttcgaagttttggcaattatgaataaagctgccacaaatatccctttggaggtttttgtgtagacgtgttttccactacttggataaataccaatgaggaaaactgctggatcatatggaaagaatttttttttttttaaaagctgccaaactgtgctcaaagtggctgttccattttgcattcccaccaacaatgaatgagagttcttttttgtttatatccttgctagcatttggtgttgtcagaggtctggatgttggccattcaaataggtgtatcatggtatctcattgttgttttaattttcatttccctgatgccatatgatatagaacaacttttcatgtgcttatttgccatttatatattttctttgctgaaatatgtgttaaagtcttttatccatttttttttggtcagactgttttcttattgttgaattttaagatgttttgcataacagttcttgatcagatatgccttttgcaaatattttctcctcgtctgtgttttgtctcccattttcttgacattgcatttcataagagcataactgttaaattttggtgaagtgcagcttatcaataattttttttccagagaacatacctttgtctttgtataagtcgttgccaaacccaaggtcatctagattttctcctacattgccttcttggagttgagttttgttttgcattttacatttacatctatggttgctttttgagttaatttttgtgaatagtataaggtctgtgtctagagtctagattaattttcttttctttttctttttctttttttttttttgcctgtgaatgtccagttgttccagcaccatttattgacaaaactgtctttacttcattgtattgcctgtgctcctttgtcaaagattagttaactacatttatgtgggtctatttctgggttctctattttgttccattgatctatttgtttattcttttgccaatgtcacagtgtcttgattattctagctttacagtaagtcttaaaatcaggtattgtcattcatctgactttattctcctgtaaaacctttttttgttttgataattctgggtcctttgcacctccatataacctttagaatgagtttatcaatattcacaaaaaattgctgggattttaattgagattgcattgaacctacagattaaactgtgaggaatgaacattttgacaatattgagtcttcctactcatgcacatgtcatctgggaacaaagttatacttctttttttcctaatctgtatacttttttttttttttacttgtcttgttgcattagctaggactcgcaatatgacgctgaaaaggagtggagagaggcccatctttgccttgttcctgatgttagtaggaaagcatcagtttctcataattatgatgttagctatagattttggaacatattacttatgaagttgaaggaattccactctatttctagttcaccgagagtttttatcatgaatgggtgatgaattttgttaaatgctttttctgcatttattgataaaatcatgtgatttttctagagacttgaaaagttgagaagtttatagccgatagacacaggctcattaaaagactgagaacaaattgtgggcctatagaacacttcctctcccctcacaccttaccaccatagcactaacagcctatttacagccgttccttttaccaagtatgtcatgtctggctatcaaataaaaaattacagggcgtattaaaagggaaaatacaattgaaagagacagaaaaatcatcagaaaaacacatcagggttgttggaactatcagacccaggaatttgaaacaaatatgccaacggctctagtaatgaagtagagagcatgccagaacagatgggcaatgtaacagagagaccgaccttctaagaaagaaccaagagaaaaaaaaagctagagatcaaaatacagcaacagaaatgaagaatgtcgttggctgacttattaataaactggacgtagctgaggaaagaatttctgaacttaaggatatatcagcagaaacatccaaaactgaaaaagtagagaaaacaaagactaaaaaacacccaggaaagagtatctaaaaatattcaaaaactgtggaacaactatagaagtataccatacatgtaatgggaatgtcacagggagaagaaagagagaaattaacagaaaacatatttaaaacaatgatggagaatttctcccaaaataatgccagatgccaaaccacagatctaagaagctcagagaacacttggtagcataaatgccaaccccctccaaatcctaagcatatcattttcaaactagaaaatcatagacaaagaaaacatcctgaaagaagctggcaaggggtggagtgggggaagtgccttacctatacaggaacaaacacaagaattacatccaacttctcttcagaaatcatgcaaggaggagaaagtatagtgaaatatttaaggtattaacagaacaaaccaccaacctagaattgtgtacccagagaaattatccctcaaaagtgcaagagaaataaagacattttcagacaaaaattggggatacgtgttgccaagtagccctgccttgcaagaaatgttaaaagttctttaaagataaattaaaagttcaggtttcttctatggcagagttgtgtaaatatgaatacattcaaaatataaatgtataaataaagataaacctcaagtaagtctcagttcaactacagaaaaataagaaagtgcttttatgagatatttagctaaaagtgcaattcctgtttgtcttttgcacactagtggagactgtcccataaccagagaacccacttgcaaatttgaaaacctaattagcttccttctcagaaacactctgcttattcttacatttatcagcttctgagaacatgacagcaggtgtaagaagcttctccatcagtaatccaaactcggtgcctgtcattgtaaggaatatgcaactgatgctggagaccagggatttcattcctgcttttgcagggacgaagtgagcttgtgtagaccatgatctctctcctgaatctacgacaagaattctgctactgcttgatgaaaagggggtcactgagaactctggattttttaatgcttatttgattccaatgagggggcaagtaaaggctctgagagcctgatggttgctctctctgaactcggtaaaacattgtaaaaatagtacatgaaaataaaataatacaattttattattgtcttgtaagtgtgcagaaaatgatactctgtcttagttttcccttagtcgtatcaaagtcttgaaaatttagcctttaccaaagcatttccttttccatctaggcataacacttctgctctaaactcatataaactattagaacattcctcaattaccacaaaaaatccttcaatttcctagtaattagtcacagaagaaagctattatgataaaaacagatggtatttgttctagcatataagtgaataatttatgtttcatgagagtagaagtcaagcatcaaatgatcaaagctgaatagaatttttagcagtaggtttttcgtatcctcctctccaaatttcatcctctcctttcttgaaggggttgacaaagacaaagtgtggcctgcctgtgttctctctcagctcagtcactttcacgtctttgaaaccaaataatgccatggggctgagtccttctcagctgaatccatgaaaaatagttcatcttttcacaaactggtaaacaagtgaagcatttcaattcacacattgggaatgtcaccatttaccatgtgatttgttgattagggaacaaaaaggagaggtggtgaagtgagcagttaagagtaagaatttaggagcctgtttgcctgggtttgaatctgatcttgaatgcttataactgtaaaatcttggctaagttgcttaactttctgactaccatttgttgtggggattaaatgaatatatatatttgaaattctggcccatgataagtgctcagtaattgttagctgattataaaagctgctataaaatcttctataatattgagaaactaagaagtcacttgtgttcagggagagaaaaattaccatttcggtagttaattatttagtaaataagcaagaaaagaagaatacatgttgacctaaaataataatgaagcccttatatgtacaatgtgctgtatcaggacatttgtctactgatagcagtataaattattgcttttacctggaaagaacttatcagaaaaaatttattccataaattgaggaacaagataaaatacataaaaacttaaccaattgttaaaattataagtatgtggacaattaagttttaaaggtattttcaggaggagatcactgtgttacagaaaagtcaaggagaggcatcatggggaaatagaaaatttaatcaggctttaaaggacagacacacattaaatttgttcattatacaattatttcttaaataggcaacaggggtttttgtaggtttgatgaatagaataataaacaaaatagacaaagtcagacaccagaagagcttacctcatgaggctcgagtctagctttgtctacagtgttcaactttctcttacagaaatatcctatgaagttttcgttctaacatagatattgctcttgcttaccataataattggcctgttttatgtgatgattaaaaggtaaggtttttttgttttgtttttggaaacaggtatcactacgttgccaaggctggtcacaaactcctgggctcaagcgatccacctgtctcagccaactgagtagctgggactataggcccacactaccacacctggccaaggtctaagtatttaagtgctgtatctgtcacttactaaattatgtggccatggacaagtacttaatttagagcatctacacatcatcaattttaataacatacaacttaccacatgattgtaaagattgaattaaattaaatgaatttaattacatgattgaatttagtcaaaaataatttttcagctgatgatagttattctggaatgtggatgaaatgttgataaaacagaacataagataaaataactaaaaaatttaagtatagattaaggtttagctttccactctcctgctattgattatgttattttactatggttaaggctgagtcaccctttatttcatattgaccttattccatccaattatttgaactgactgtaatggctttcttgtttggtttctttagttcacaggttttatgcacagaatgaaacattcttgcccctggtgtaacttaatgtaaattctaagatgaattcacatgagccttatggagcaggtgtcagatataatactattatattgagctatggtgccaataattagatccgtatctgggggctcatttaacaggtttctgcattgaaaggagagaaaataacctttctaggctttccttggggaggaatgctttttggatattcaatttatgacttgtacatacatggtagatgctcaggaaggattatagaagaaaaaaaggaaggacaacaatctggcagacaaacaagcatcactctccaacaaatcagcacctggtcctaccaaggtccttttccatgttacctcttcagacatcaggaggagctgtgttatctgtgcatgggggaatggatcttgtttgtggttggctgggaggactctcagcttcctgtaataacagaactctgaatattcactcagagaaacaagctattggcttggtagtgtttgagggctcccagaccccaaccagagtccgcagtaagtctcatggataaagtggagaagcccttgggagtttgtggagaagcccttgggagttttgttcttgattttctcttggcagctgtgctgtgagttttggggctctggaaatatcattgaaaagagcagtttgtagtatcttctttaaaagtctgcacttggacacaggaaggggagcataacacaccggggcctgttgtggggtggggggacggggtagggatagcattaggagatatacctaatgtaaatgactagttaatgggtgcagacaccaacatggcgcatgtatacgtatgtaacaaacctgcgcgttgtgcacatgtaccctagaacgtaaagtataataaaaataaataaataaataaataaataaataaataaataaataaataaataaaataaaagtctggaagttatagaagggtggttagggcctctgtgctcacctgtggggacttgaaaggagagtatatcttccaaaagtagtcagccatgaatgaatgtcctctgtctgtggttctctgtttaaacaggggtgaacagcctccatattctggagtagagtccttcattcattcctgagtatccgggagggaatgcacaacattcttaattgcacttatgaggagagaacgttctcttaacttctactggttctggcagggtctggaaaaggacttgtgtctttgaccttaattcaatcaagccagatggaggagggagacaaacattttaaagaagcgcttggaaaagagaagttttatagtgttttgaatatgctggtctctcatcctggagattcaggcacctacttctgtgctttgaggcacagggtccccaagcacctgcagcctgtaccacaacctgcatccgggacccttgacacagccttgccttgcaggtgggagtgaaggtgttgtctttatatgtagagagaacttctttataaactctgtctccaaacagaagcgaagggtagtgcagaatctttcttatgtgatgaagctgaatttatattaaattaaattgcattttgttattattgaaatttcattcttcaatgtagattgtgctgtgctggttctgggcctgtttgcccaccgatcccttccacagctctgtcctttactctaaagtcgcagaccactgtggcacaggctctgaggccaagaggcaagttttctccatgctatactctcaccaacagtattttacccatttgcttgtaaattcatgatgtttcttgtatttgtatcatctatactattatttacttaattaaatgttaaattaacttttatgttgagtagacttcaaaactgtgtaaaatattgttcttattttaatggatactatcagtgaaattatattttatataaactatacatctgatgtgcaggctatgtttgttcctgatacaaactaaaataacattacatgtataacaattaaaaagaccatctgtgtactgcctaacatgacctcctatgttaaccacaatttagaaaatactgattcagctcatgtccctcatttaatagatgaaaaaagtagaatcaacagggacagcatcacttactcaaagcatgaattacagcaaaatggaagctaggaatggaacacagacattgtggccccttgtcacttgctttttccatgaaggatgtaaagtaggattcagtgtttgaaaaaaggagtggtatgttgtaattttaaactaaattatacttttattacttaattatatgttcattagaataaattaggagatataaacacccagaaaacatagaacactcctataatttcataacctagaaatgatagctattcgcatgcaataaaatttttggtgcacatgtaaagctatatttttgtataaatgtggtttataatacatcaagtatttattagcacacttttctttcaactttatatttaggtattttcaactcaggaagcaaatattgaagaataattttaaattattgcctagtttccattacataaatatgcttttttaaaaactcttttttttggtattgtttctacttatacagtattacagataatgtttttattaacatcattaaaggtgtagttttaatggaagtgaagttgctggaataaagaaaaacacatgatactgaatcccttatttccatggagctatttctcaccaaactgtaatttcaacagtagcacatgatgatgctaattttccaatattttaccaattgtaaacattattattttagattagcttccattttgttaagtaaaatattgttttttattattcttttcttttaatttgtgattttatacctttgattattaaaataaataaataaaatgagatgagaaaacatcagatgccatcacacagaataggtatcctttcatacagtaacatgtattttttgaaagtgtgaaaaatactgctttggtccaagctaccttctaactggtctctcttttctcaaggcaatcaattctctatgtccttgctacttgaagtgtgagccagcattgtctgaacttgtactgattctcaggctctaccctaggctgattgaatttgaatctgcattttatcaagatttccaggcgattctatcacatcaaagtttaagaagcacccatctgatgagttgccagaatgattttttaaagtataaataaagagctttctccacttgtcaaacgtgcttcaatggctttctactgctcctggaataaagtgtggtggctttcaggctgtgatataaaaggatctatataatcggaacctcccttggccctttggctttaaattctcttttcctggctctctgtgcagcaaaacttctgattctctttcccacatgtaggctctctttcatccatctgaaatgctctttccctaaatcttgttgagcctgactcaacaagagtcatccttcaggtctcagctcaaatgttactactgtagaagaaaaacctactgacctctgctactcttcctgactaatatatctgtctgtaatcctccccctaactctgtcagaacactctagttatttctcctatgttatttatcgtaacttacagttacatttttggtttatttgccagtatgttcattggccataccttctattagaatgcaatctttatgatatcaggggtattgttggtttagttcatggcttgattctttttgtttgtttttctttttttttttccaatttttattttaggttctgagggtacatgaaaaggtttgttatatgggtaaattgcatgtcacagggacttggtggagagattattccatcacccaggtaatgagcatggtacttgataggtagtttttggatcttcaccctcttcctactctccacctccaagtaggccccagtgtctgttggttccttctttgtcttcatgtataatcaacggttagctcccacttataagtgagaacatgcagtgtttcattttctgttcctgtattaatttgcttaggataatgccctttaactgtatcgatgttggtgcataggacatgatttcattcatttttatggctgcatagcattccatggtatatatgtaccacatttttttccagtacaccactgatacgcatctagattgtttccatatctttgctattgtgaatagtgctgcaatgaacatgtgtgtgcgagtgtctttatggtagaatgatttatatttctttgagtatatacccagtaataggattgatatgtctgatagtatttgttttatgttatttgataaatctccaaatggctttccacagtggctgaactaagttacattctcaccagtggtataaaagcattcccttttctccccaaccttgccagcatctgttattttttttactttttagtaatagcctttctgattggtatgagatggtatctcattgtggttttgatttgcatttatctaatgattaatgatgttgagcattttttatatgcttggtggttgtattgatgtcttcttttgagaagtatctgttcatgtcgttttcccattttgtctgttcatgttgtttgttttttgcttgttaatttgcttaagtttcttatagattctggatattacacctttgtctgatacatagtttgcaaatattttctcacattctgtaggttgcctgtttactctgttgatagtttcctttgctgtgtaaaagttctttagtgtaattaggtcgcatttgtcaatgtttgggtctttttgcaattgcttttggagtctttgtcatgaaatctttgcaaggcctccagaatataatttcataagttttcatctagggtttttatagttttaagttttacatttaaatctttatttagtccatcttgaatttatttttgtatatggtaaaacaaagagatccagtttcagtcttctgcatatggctagacagttacaccagtaccatttattgaataaggagtcctttactcattggttgtctttgttggctgtgtcgaagatcaggtgatcataggtgtgtggctttgtttatcggttctctattctgttccattggtttatgtgtcgatttttggattattaccaaggctaagttttggttacttagctttgtactagaatttcaagttgggtaatgtgatgtctccagttttgttccttcttttgttaaggattgctttggctgttcaggctcttttcttggttccatttgaattttagaatggtttctactaattcggtgagaaatgacaatgataatttgataggaatagtgttgaatctgtagattgctccgggctgtatggacattttgatgacactgattcttccaatctatgagcatgaaatgtgtttccatttgtttttgtggtctatgatttctttcagctgtgttttgtaatccctattttaggtatctttcacctccctggttagctgtattcctagataactttttttgtgtggctatagcgaacaggattgtattcttgattttgctctcagtttggaggttttcagtttatagaaatgctacttattcttgtacgttgattttatatcctaaaactttgctgaagttgtttattaggagccttttagcagaggccatgggttttctaggtaaaaagtcatatagtctgtgaggatagagattttgacttcctctcttcctatttggatgccatttatttctttctcttgcttgaatgttctggctaggatatccagtactatgttgaataggagtggtgagagtgagcatctttgtcatgtttttgttctcaaagggaatgcttccagcttttgcttgctcactataatattggctgtggatttgtcatagacggctcttattattttgagttatgtttcctcaatgcctactttgttgaggagttttaacctgaaaggattttgaatttcatcaaatgttttttatgtctattgaggtgataatgtagtttttttttttttagttcagttcatgtaatgaatcacatttattgatttgtatatttaaacaaccttgcatttcagaaataaagactacttgattgtgctggattagctgcaggatttggtttggcagtattttgtttaggatttttgcatgtgtattcatcagggatattggcctaaagttttcttcttttgttgtgtctcttctaggctttggtatcagaataatgctggcctcatagaatgaggtaaggaggagctcctattcctcaatattttggaatagtttcaaaaagtaccagctcttctttatatgtctggtagattttggctatgaatctttctagtctggggcttttttcttgttgtaggtttttattactaactcaatttcagaactccttattggtcagttcagaatattgatttcttcctgagtcaatcttgggaggttgtatttttccaggaatttatccatttcttctaggttttctggtttatctgcatagaggtgttcaaaatagtctctgagggttttttgtactgctcctgtgacatttctgattgtatttatttggatcttctctgtttttttctttattagtctagctatcagtctagcaatcatttttattctctcaaataaaaaccatttggttttattcatcttttgtatggtttttcatctccatttcattcagttcagctctaagtttgttatgtctcttcttctgccagctttggggtgggtttactcttgggtttttttagttactctagatgtgatgttaggttggtaatttgggatctttctaactttttgatgtggatgtttagcactatgaactttcttttcaacactattttagctgtgtctcagtgattctgttatgttgtatcttttttttcattagtttcaatgaatcccttgctttttccttagtttcactgtttactgaaaagtcattgaagagcaggttgtttaatttccacataattgtatggccttgagagatcctcttggtattgatttctatttttattgcagtatagtccaagagagtggttgatataatttggagtttttttgaattttttgagaattgctttatagtcaagcatgtggttgattttagagtgcagataagaagagtgtgtattctgaggttgttgggtggagtgtcctatagatgtctgttaggtccatttggtcatgtgtcgagtttacaacccaaatatctttgttatgtttctgcttcaataatctgtctaacactgtcagtggggagtttaagtctaccagtattattgcatggttatctaggtctcttcataggtctctaagaatttgctttatgaatatgggtgctccagtgttggatacatacttatttaagatagttaggtcatcttgttaaattgaacacttatcattattcattatttaatgcccttccttgtgctttttcatcattgtatttagaaagtctgttctaactgaaattagaaaaagtaacctctgctctttttggttttctatttactttgcagatttttcactgtctctttactttgagcctatgtgtgtcactgcttgtgaaatgggtctctaggagacagcatacagttgggtcttgcctctttatccaaattgctaccctctgccttttaaagtgggtcatttactctgttcatgtttaagtttaatattgatatgtgtggatttgaccctgtcttcgtgttgttagctggttgctatgtagacctgattgtgcaatttcaccaggtgtggtgggtgatgcctgtaattccaacactttggcaggacaaggtgggcaaattgcatgagcccagtagtttgagaccagcctgggtaatatggcaaaaccctgtctctacaaaaaaataaaaaaatttagctgagtgtgatgctgtgtgcttatagtcccagcaggctgaggcaggaagattgattgagcctgaccagtcaatgctgcagtgagccatgattgtaccactgcactccagcctgggtgacagaatgagaccctgactcaagaagaaagaaagaaagaaggagagaaggagagaaacagagaaagaaagaaagaaggagagaaggagagaaacagagaaagaaagaaagaaggaagaaagaaagaaagaaagatagatagatggtggagctgttttacagtgtcaatggtctgtcttaattgtgtttttgtggtggcttgtagcagtcttttttccccatgtttaagcattcctttagggacctcttataaggcaggcctggaggttacaaatttctttagcatttgcttgtctgaaaagaattttgtatttcctttgctgataaagcttagtgtggttggctatgaaattcttgtttggaatttattttctttaaggatgctgaatataagcccttaatctcctctggtttatgaggtttctactgaaaagttcactgttatcttgatggggtttccttagtagatgaccagccccttccctctagtggcctttaatattttttctttcccgttaaccttggagaatctaatgacgatgtgtcttggagatggttgtcttgtacaatgtcttgctggggctccctgagtatcctgaatttgaatgttgaccttcctagtgaggttgggaaaatttttatgggcaatattctcaaatatgtttcccaagttcctttctctttctctctctctttcagggatgccagtgaattataaatttggtgtctttacataatcccatatttttcagaaatttttgttcattattttttattcttttttctttatttttgtctgactgagttgattccaagaactattctttgacctctgagattctttcctcagcttgttgtattctcctgttaatacttaacaattgtattataaagttcttgtaatgagtttttcagctctatcagaacagtttggttctttcttaaaatggctattttgtctttcagatctcatattattttatttctttacattgtttagattccttggattgggtttcaattttcttatgaatctcaatgttcttacatccaaattgtgactgctctgtgtgtcatttcagccatttcagcctggttaacaaccattgcctgggagctagtgtggttgtttggaagtaagaagacactctagcttcttgaggtgccaaagttgtcgtgttggttatttatcatctgtgtaggctgatgatcctttaatatttgaagttcttgtcctttgaattttttttttacttttgtattattttatgcccttgagggatttgactgtggaataagttgcgttcagtcaactggcttcatttctggatgatttcaggggtcccgggttcagatgagcattcctgcactgcatgctctaaccctatggggttgggaccaggcccacttctttgttctctggcccctttaggttaagtaccgactgaactggaggggctgaggtgttactggtttgctgacatcaacactccacttgggggtgctggcaaaagcacttcattgaacttgtggcagcaggatcagggctcatgtacacctgtgccaggggcaatggcgggagggtgtggatatgtgtcagcagtggcctgtctgcagaagctctctgatggttaggcagagtttgctggtgaagtagctatgacaccagtcaccaggaagtgccctggttggacacctaacgcagagttgcaagtaggcatggtcaggtagggaccctgggagaggtcggcagacaagggggtgctcagatcagactagtcctgacccatgggcaagacaccgctactctgtccaggtctgacagtcaacaaaggctagagccacgtagaggagcatggtgcaccttggggaatgggcatccctactgggctcactgcctctattcccatgctaaacactctgggcttcacacaggctagagtcctgtcactgccagcactccaagtagctctccctgccagctcaaatttctatgggcatcatggggtctcctgcagttaggattcgagaggtccatgggaggagttagcaaatgctcacctatctaattcagcctttcctctggagacattgagcgtcatgaatgagtcccagtgcttggcagccctgtgcagggttcccgggttcctctcactttggtccagggtctgagtcttgtctccatccattctcaatgcattctttctgacgataccctcagagaatgcaagtcttcctgatggtctgatctcttggtaggagaagctctttctagctgtgtctaattgacgatcttggagctcctcttcctggctttattcttagtgtctagaataatgactagcccatagtaatcagtcaaaaaatctactgagtgaatgaagaatgaaatttgtttggccctcccctctttctcccttttcccttcctctcattcccactctagcaactttgacctttgtgtatgttgtctctacttcactatgtggggcagctcaattttctctggccctcacccccagactcagaacccagtctttttgtacttagtggcttctgtcaaatagattcactcagggcctcaacctttcctcacttaattgacctcaccttatcagatgtgatgtgaaggactgagtcaactcttaaggctagtaacccatagcgaaatatctaaaagaaaaacgacatacttaaaagatgtttggaaagtataaaagtaacttctcaagcctaataattatgagcacatatcaaagttttatttcaaattactgcaagagaaaaagctcctaaagaaacaaattcaaataattagccttggtatattgttacaggaatccagatttttaaaaatctggttaaagatcatttttgcattcaaatgacggttgcataattaccctgcttttgactgcctgtgtagtgactattaggcttctcacaagattaatggtcatttgagtttgtaacactaatttcccagaaggaatctttatttcattaaaggatattagaaaattgctcaagcgttttattagaagtgatggttaattaccatatggggctatgtatattatatcctccgaaaaatgcctgcttcataccagtttggagaaacttacctttctcagctatgtatgttatatcctccataaaaggcctgtttcataccagtttggagaaacttacctttctcatgtgtaatttaaatctttactttacaaatctttacaactcctttagtgaggatttgtcaggtcttggattttgtcccttcttacaagctaataagcttgtttcattgaggctgtcaataaaaacacagggctccttagtaagagacaaaggatttttattacttatggcacaacaaacagcatgaacattgatatatttccatcagtttctcctgcctttaagtcctcaaaagatgatgtaatgggtagtaagggatgctacccatgaagtggtattatgtcacaggtgaggaactctgagcttaggaagttcattgcttttataacaagcactcagccagcttgctctttgtctcagagggagacattacctcatctcccaaggttgcttgctggcataactctgagaagtgatccaggtagaatgctcatgtcattacactgttggcacactcatcaagtcacgtttgagtacaagagactcatggtggactgcctttcaataatatccactccatggtcttacactgggttagttgctagaaatttattttatgagtatgccagtttgtcagtcattctgatttgtgtaactgagagatgtcatgactaaatgcattacatttgtctcaagtagcatttaattaaggctactatcagcagaactctaagaagcagaatgagaccaacatgcagtattaaccttaattatgcttgatccagccaaatgtgagtaagttccaaagtacagacagctagcatgtagtattttatctattataacccatacatgaaagttcagactgaaatgttggtctttctttgaattaccacaaagaaaaaaccctaccattcccaatatagagatgttatatggtccctttcccccgggcataacccaaaatgcacaagttaatcaaatttgggatttattattaaacttgatttggataagcattgcatcactttggttaaactacgtgagcagtgtcagtgagtatttgcaatatttgcaacctctgtagccattcatgacataacccaactgtcaagatatcaggggaagcatatacatttgtgtcagtcaatttgagacaaggttgtgctgattcttgtgtttgtatacttatgaagatggggaatctatattggaaagctgccactgataaaatagtctgggagccacattcacaagagttttcctgttttcttgggatgtgggaggagataacaaaccaatagcaggacacagagttgctgcttggctccagaagacaatatgtttgtttttctatacttgttctagcatacaaagagagcattagaccctcacttctccccactggccagggtctaagagtttctcttgctatgtgctcatcatcactaatcatcagagagatatccatcaaaaccacagtgagatatcatctcacaccagtcagaatggctattattaaaaaattataaaacaacagatactgttgagactgcagagaaaagggaacacttatatgctattgatgggaatgtaaattagttcagtgcctgtggatagcagtttggagatgccccaaagaacataaaacgaagctatcattttacccagcattcccattgttggatatatatgcaaaggaaaatagattgttgtaccaaaaggatacatggcttcttattattattgccatggtattcacaatagcaaatatgtggaataaaactctgtgcccattgatggtggattggataaagaaaatgtggtacatatataccatggaatactatgttgccacagaaaagaatgaaataatttctttgcagcaacatgaatggatctggaggccattatactaagtgaattaatgcagaaatgttaaaccaaatatcacatgttcttacttataagtgggagccaaacacagaacctacgtaaacatggcaacaactatggattaccaaagggagcaggaactggggggtgcattaaatagtacctatcgagtactatgctcaccacctgggtgtaatatacacatgtaacaaacctgcacatgtacctcttgtacctaaaatataaactaaaatatttaaaaatagactcaaaattagcaccattttcagaagcgtttattttaagataaattgcttttaaatgaaatcttgttttgcaatactctgaggttcacaagacatatctagaaaatgtactattgcggaaggtgaagacggtgtaaaaccagtgggggagaggtcagtggtttttcttattggttgattatcagaacactgtcctttggggatatgaaagagttttatatattctttagacataattagacaaacaatggtccatagggcaggtttgatgctgtacaaagtctgtcattttgctagcactgatatggttcttgggtccaccacagcattagatctgttgatgcatttatattatgctttgttacaaatcttgaaaagaggggtgcttcttacagactttgcttcagatattagattttgttttagtaaattttccaagactgtagtggctgccagcttgtgttactttcacttttcctctggtttttgtatttaccgagaaatggtcatggtttctgtcaagtgcaatgtacccttggagaaaggaatttcaatattagcatctattccctcattctatttcctaggtagttgttggtgggaatgggaaaggttagcctcagccatctttggtgaataccgattacatggctcttgagtggaaaaaagcctgcttcattgttggcctcttcaaggacatgaaacacgttgtggaacagaagagaacagtagttgtctgtccttgtttatctatagactcaattgagtttcttgcatagatagctccctgatagatttggtttgctggttatgtcaggatgaacaaaacctataacttttagagattgattcctaggtatcagctttatacaagaaaggcaataagagggacaggacaaatgaacaggcacattgggttttattgacagtctaggtactaaaggcaggttcatctcaattgcaccaacccaagcaagagctgttttggcacagatgcatcattggtgcaaaatggaatgacaaagtccaagctcctccagttcctggccttgttaaaaaatattgcttaggctatgggctgcaaccatgtttgttttgttcagctagattttaggccatttcatcttggaagacttattttgagttataagaaatttctttaaaagttgtatataacagagtagtataggaatatgtggcctgacattaagaagagctatacagtgtgaaattctccctgaattgcaagaatctcactcagatttctataatagaatctgttatgtctgattttttagttcaggaaagtggctattagaaataagtggtcttactgacccaagagttgccatttgatggaaactcatacacacatatatacccctctgcctttctcacacatacattgactttgacttttaatatagcttaaaagctttattaaaagtttttatttttaattgattcataatatttgtacatatttatgtggtccatgtgatattttgttaggtgcatagaatatacaataatcaaggcagggtgtttagaatatctattaccaagagcacttatcatttctgtattgagaatatttcaagtcctcacttctagctattttgaaagtacaatgtgttgttgttaactttagtcattctactctgctattgaaaattagaacttattccttctgtttctacccactaaccaacctccttttattcccccaaccacatccatttccttcccagtctctgataaccatcattctagtctctgtctccctgagatcaactctttttttttagcttccacctatgagtgaattcatgcaatatttatcttcttgtgcctggcttatttcatttaacataatgacttccagttccatccatgttgctgcaaaggacacgatttcatttatttttatacctgaatagtattccattgtgtaactatacaacattttctttatccattcaccagtagatagacactttgttgatttaatatctttactattgagaatagtgctacaataaacatgaggaggcaggtatgccttcaaaacacttctttcctttggataaatactcagtagttggattgctggattgtatggtagttctattactagatttttgagaaatttccctactgttttccagagtggctgtactaatttacattcctaccaacaatgtttgagagttccattttctatgaatcctcatcacatctattattttctatatttttaataatagcgattctaactgggataggatgatatctcattgtggttttgattcgcatttccttgatgattagtgatgttgagcatgttttaaatacctattggctatttgtcttcttttgagaaatgtcaatttagatcttctgcccatttttaaatgggattgtttgactttttttttttgctgttgagttgtttgagttccttgtatattctgaatttaactaaagtgtcatattttcacttttagcagttcacataacacaggtctgtagttggaatacatctttgatcactttcatgagtcctcaagatggcagtgtcttctcagggaccttggggcaagctctcatgtgctcctgcggtggggaggggaggggatgcatgtgcacttgcaagtgcacacacacacatgaataagagcaagacagagggagagatgagggaggagcttaatgatggagcagaggtgttaaaaagaacatcctttttctaattggtaggacagatttcttttatgattcctacagcagaaaaatgagaaacgtttgttattatttttttttcgtgtttaaggtttgaatcctcagtgaaccagggcagaaaagaatgatgaaatccttgagagttttactggtgatcctgtggcttcagttaagctgtgagttttgggcatctctgtagaaacataatgtatattgtttgcaattattgtgtattctaggcctgtgggtagaaacatgagtggttttttctctaacaaagggagactggggagagtggggggcccatgaaaagatgatttaaattctgggtacgaagtgtcccctacccaatctgtcttctctgtctgactgctgtcttttttcacaggggtttggagccaacagaaggaggtggagcaggatcctggaccactcagtgttccagagggagccattgtttctctcaactgcacttacagcaacagtgcttttcaatacttcatgtggtacagacagtattccagaaaaggccctgagttgctgatgtacacatactccagtggtaacaaagaagatggaaggtttacagcacaggtcgataaatccagcaagtatatctccttgttcatcagagactcacagcccagtgattcagccacctacctctgtgcaatgagcgcacagtgctccccagacacttgcagtctgtacccaaacctgctgggccccaggaatgcctgatgtagagcttagactgcaaggcaatgaagttctatttgttctctagatgcaaatgaaaactaaaagcagtagtattgaaggtttgattaatttgggacatattttcataattctgaaaattattgagaccccaaaggaaaataaaagacaccatttggtctacttgaaatattttctagtcttctctttccactttagttttgaaattttttttttgctgactttgtggctcatgtctgtaatctcaacacttctggaggcatagggaagaggatcacttaaacccaagaatttgagactagcctgggcaacacagggagaccttgtctcaaaaaaagaaaaaaaatcgccaagagtggtgacatgcacctgtagtcccagcaacttgggagggaagaggtgggaggatttcttgagtcggagaggtggaggctgcaatgagctgtgatcacaggactgcactccagcctggacaatggagtgataccctgtctcaaaaaacaaacaaaaacaaaacacaaaacaacaacaaaacacaaataaaatatttttattgaggtgttattgacacacaaaaaggtgcacatattcactttatacagacaatataatcgtgccataaacatatgtaccatttctaaaaatttgcttcctccctggtttctttttattaagttattattgctatacaaaaaggtacatttatttaatccatgcccagtctacttttatgccacatctttactttatgagattggttttatgattctttttatcaaagacaagaaaatatttccatacaataacagatatgctctcatggttcctaagacattttgctctttccccaaggcatttgatagacattgctttaagaatgaaacagcaaagcagaaatgcaaagagaagaaaaatcataagcagactaatttgaaaatccggtaagtcataaattttttaagttacagaaccctaactccatctccagcctcaactacaacatcactcctgagttatataagggtacacctgatggacagctggaagaactagagtgagagagtgagaactggttgagaaaaagcctaattagttgcacaaactaaagattagagagggtctatgttgccattttggggtaaagttttaatcaaattcaaaactcccagcttgagcctgatgggatagttttttgattcctatgtacttgagtgtggcctggagatgggaaggagcattggctgtagttatagagtgcctcatctccccagcagggcatgacagcacagaaggacttaaaatttttttgagaagggtctctaagtatcttaaagagatccagacaccaaggtcctttgttatgatgagtaaagacctgtatgaataagataccaaagaccgtatggaattgagaatgcttcaggaaatgtttgtctggagagttggaaacactaaacatcatatgaatatctccatcccctgactacaaggcaccacagatttgccctgcagtgtatgtcaagtatggggaaagcatttgtggcctgacgaaataaggccttttagtagacattactttgaattacaggcaaaatatttgagaatcatatttactgtaaaaatgaagttgtggtctgataggcataacattatttatgtagcccagaaggtgggaaaagcttggaaatgaagaataaatgtttctgtccagttttattgacagtcactgatgaaaatgatgaagccaagtcagaatttgctgcaacttcttactctgcagaagtgaagactctgaacaaatatttcccagtcatagaagaaagatttaaaaagcaaggaggaagagcaaacagttgtgctggaatcaaggtacttaaatttttattccacttttatgatttgccttctggcatcatggcactctggaaagaactcaggctgtggtgctggtttgaacatcgattatattacttatggcctttttcatattaagctctacaattatatatatttcaggactggtttcaggattccgtgagacaaaatattgtcttgggatgagttccttaaaagcagagactgcatttggaattctctgtctgtaatttatttgggaaaccaggttgagatgggggaaaggctggacatgagggggaaaggttgagatgctggacatggtccagcagaggtcttgatccagcctgacctcatggggagctctggagcttgaactgtatcacagggttgattcctcccaccctgaggcaaggaggccagactgctcggacctattgtgggtaagaataaagtcatcattggttgtggtgtttcttggggtagaggtatatgctactggacaatggtgactctcattggctaaggtcaattttctagggaaagaggcaactgtgagccaagagtagccaacattcacagtagctggggatggctacactgtcctaggaaaggggatctagcttggggaccagcagtgctcattattaacatggaacttgcctggtatgtgggtagcatttgagaaataatagactttgagcagaataaatgatatcagagattgaagatcaacttactgaaataaggtgtgaagacaagattagagaaaaaagaatgaaaaggaacgaacaatgtctccaagatatatgggactctgtgaaaagaccaaacctacgtttgattggtgtacctgaaagtgacaggaagaacagaaccaagttggaaaacacacttcaggatattattcaggagaacgtccccaacttagcaagacaggccaatattcaaatttaggaaatacagagaacaccattaagacactcctcaagaagagcaaccccaagacacataatcgtcaggttctccaagattgaaatgaaggaaaaaatgttaagggcagtgaaacagaaaggtcaggttacctacaaagggaagcccatcagactaacagcggatctctctgcagataccctacaagccagaagatagtgagggccaatattcgacattcataaagaaaagaatttttgacacagaatttcacatccagccaaactacgcttcataagtgagggagaaataaaatcctttacacagaagtaaatgctgagggattttgtctccaccaggcctgccttgcaagagcttctggaggaagcactaaatacggaaaggaaaaactggtaccaaccactgcaaaaacacaccaaaatataaagaccaatgacactatgaagaaactgcatcaactaatgtgcaaaataaccacctagcatcatgatgacaggatcaaattcacacataacaatattaaccttaagtgtaaatgggctaaatgccccaagtaagagtcacagactggcaaattggatagagtcaagacccatcggtgtgctgtattcagcagacccatctcatgtgcaaagacacacataggctcaaaataaagggatgaaggaatatttaccaaacaaatggaaatattttttaaaaagcaggggttgcaatcctagtttctgataaaacagactttaaaccaacaaagatcaaaaaagacaaagaagggcattacataatggtaaagggatcaatgcaacaagaagagcgaagtatcctaaatatatatgcaaccaatacaggagtacccagattcataaagcaagttcttagagacctacaaagagacttagactcccacacaataatagtggcagactttaacaccccactgtcaatattagacagaccaagaagacagaaaattaacaagtatattagggacttgaactcagctctagaccaagtggacctaatagacatttacagaactctccaccccacatcaacattcttctcagcaccacatagcatgtattctaaaatcaaccacataatgggaagtaaaccactcctcagcaagtgcaaaagaacagaaatcataacaaacagtctttcaggccacagtgcaatcaaattagaactcaggattaagaaactcactcaaaaccacacaactacatggaaattgaacaacctgctcctgaatgactactgggtaaataacaaaattaaggcaaaaataaataagttctttgaaactaatgagaacaaggagacaatataccagaatctctgggacacagctaaaacagtggtgagagggaaatttatagcagtaaatgcccacatcaggaagtgggaaagatctaaaatcgacactctaacatcgcaattaagataactagagaagcaagagcaaacaaattcaaaagctagcagaagacaagaaataactaagatcagagcagaaatgaagtagatagggacccaaaaaacccttcaaaaaatcaatgaatccaggagctgtttttttttgtaaagatcaacaaaataggtggatgactagccagactaataaagaagaaaagagagaagaatcaaatagacataacatgaaatgataaaggggatatcaccactgatcccacagaaatacaaactaccatcagagaatactatgaacacttctacacacaaaacaataggaaatctagaagaaatggataaatgtgtggacacatataccctccgaagactaaaccaggaagaagtagaccaataacacattctgaaattgaggcagtaattaatagcctactaaccaaaaaaagcctatgaccacatggattcacagccaaattctaccagaggtacaaagaagagctggtaccattccttctgaaagtattccaaacaatagaaaaagagggaatactcccaaactcattttatgaggccagcatcattctgatatcaaaacctgacagagacacaacaaaaaaagaaattttcaggccaatatccctgatgaacatccatgcaaacatcttcaataaaatattggcaaactgaatccaacggcccatcaaaaagcttatccactacgatcaagttggctttatccctgggatgcaaggctggttcaacatacacaaatcaataaacgtaatccatcacataaacagaaccaatgacaaaaaccacatgattatctcaatagatgcagaaaagacctttgataaaattcaacatcccttcatgctaaaaactctcaataagctaggtattaatggaacatatctcaaaataataagagctatttatagcaaacccatagccaatatcatactgaatgggtgaaacctggaagcattccctttgaaaaccggcacaagacaaggatggcctctcttaccactcctattcaatatagtattggaagttctggccagagcaatcaggaaagagaaagaaatagagagtattcaaataggaagagaggaagtcaaattgtctctatttgcagatgacatgattgtatatttagaaaaccccatagtctcagtcccaaaactccttgagctgataagcaacttcagcaaagtctcaggatacaaaatcaatgtgcaaaaatcacaagcattcctgtatactaacaatagacaagcagagagccaaagcatgagtgaactcccattcacaattgctacaaagggaataaaatatctaggaatacaacttacaagggatgtgaaggatctcttcaaggagaactacaaaccactgctcaaggaaataagagagggcacacacacacaaaaagaaaaaaactccatgttcatggataggaagaatcaatatcattaaaatggccatagtgtccaaagtaatttatagattcaatgctattccatgaagttaccagtgactttctttactgaattagaaaaaactactttaaatttcatacagaaccaaaaaagagcccgtatagtcaagacaatcctaagcaaaatgaatgaagctggaggcatcatgctacttgacttcaaactatgctacaagtctacagtaaccaaaacagcacggtactggtaccaaaacagatatatagaccaatagaacagaacagagacctcagaaagaacaccacacatctacaaccatctggtttttgacaaagctgacaaaaacaagcaatatgaaaaggggaaagaattacctatttaataaatcgtgttgggaaaactagctagccatatgcagaaaacagaaaccggatcccttccttataccttatacaaaaattaactcaagatggattaaagactaaaatgtaaaaccccaaaccataaaacctctagcagaatacttaggcaataccattcaggacataggcattggcaaagtcttcatgactaaaacactaaaagcaattgcaacaaaagccaaaatagacaaatgggatctaataaaactaaaaagcttctgcacagcaaaagaaactatcatcagaatcaacaggcaacctacagaatgggagaaaatttctgcaatctatccatctgtcaaaggtttaatatccagaatctacaaggaacttaaacaaatttacaagaaaaaaaaccaaacaaccccatcaaaaagtgggagaaagatatggacacttctcaaaagaagacatgtatgtgaccaaaaaacatatgaaaaaaagctcgtcatcactggtcattagagaaaggcaaatcaaaaccacagcgagataccatctcatgccagttagaatggcgattattaaaaagccaggaaacaacagacgccggtgaggatgtagagaaataggaacacttttacactgttggtgggagtgtaaattagttcaaccattgtggaagacagtgtggtgattcctcaaggatctagaaccagaaataccatttgatccagcgaacccattactggatatatactcaaaggattataaatcattctactataaagacacatgcacacgtatgtttattgaagcactatttataatagcaatagcctaccgtagtaaatagcaatagcctaccctagtaaagtttaatattttgaatgaaatatattatgttgtcttacatatgaaaagaaaatctacaggcagaatcaaggaataggtcagaagtgcaagggagaactgatttcccactggcatgagtcaacagagtacacagaaaggaaggagtttgttttgacctttgaaaagaattcttgttagccggttcttatttcacctgagtttttttctttatttgattttttcaattttaggatccaatgatctctatgctaaaataagttgggtgaggaagtcttttcattcaagaatttcatcttcttaggccatagagttgactgctctggttcaatgcatcctgtctcccacccacaggggactgcttcttgcctagctctgttgagtatcactgtcaacctatcctaagtcttctatacctcccattttcttggtcatctcatttcttgtctgctggttgcactcctcccagctttactgagttcacgtaggcttacttttctttctgtatctttaattcttcccataattacttatttatatgttatattttattaccttcattattctgctcaaatttctccataaatgggcttctgttgatgttctttttaaggcgagataccataatttggcataatgtatcagtctattctgagcgttgataattcaaatgggacttttctctaagttttttctcctagccttacaaacatcaaacttgatttgaaaccaagaagtctttttcacaatttctgcttcacaaagaaaattattacctattagtttgcattgactaattagctaatgacacgtgatccaggctgattttaagtatgagtctctagtcatttttttttcctttagcacctaataaaagagaaatctcttccatccactctaatgctcatgtgaatccactagcacagtgccacacgaagcttagctaagcctgaggcaattgatcttctcccctctccttgatgagtgcctctaaaaaataacatagagcatcttaatggtattccaaaatctggaatattgccttctgtgactaatttctcagtgaagtaaattacttttctagttttacataactccaatttcttgtctattttttgaggggaaaaacatttttattttctaatttttaaattttatttctttcaactgttattttagaatcaggagtacatgtgcaggtttgtaacagaggcatattgcatgatgctgaagtttggactatgaatgcattgtcgctcaggttgtgagcatagttcctaatagttttcagtccttttctccttccctctcttcccactctagtagtacccagtgtctattgtgactatctttatgttcatgtgtagctagtgtttagcccccacctataagtgagaacatgcagtatttagttttctgcttctgcattaattcctttcagataatggcctctagctgcatacttgttgctgcaaaggacaggatttcatttttctatggttgcatagaagtccatggtgtatatgtgccacattttcttcatccaatccaccaccgattggcacctgagttgattccatttctttgctattgtgaataatgctgtgatgaatgtatgggtgaatgtgtctttttggtagaaaattttatttgcctttgggtatatacccagtaatgggattgctgggttgaatgttagctctgttttaagttctttgagaaatctcaaaactaatctccacagtagctggactaatttatatttccaccaacagtatgtaagtgttcccttttctacacagcctagccaacatctattattctttgactttttaaaaaaagccattctgattggtgtgagatggtatctcattgtggttttgatttacatttctctgatgttaagtgatgatgagcattttttcatgtttgttggctgtatgtatgtcttcttttaagaagtctctgttcatgtcctttgcctacattttaatgcggttgctttttgcttgtcgatttgttgaagttacttttgtttctttctttttttggaaagacagggtctcactctgttgcccagactggagtgcagtagcatgatcctagctcactctatccttaactccagggctcaagggatcctcctgctttagctgggactacaggcacatgccactatggccagctgatgtttttcttttccttccttccttcctcccttccttccttccttccttcttccctccctccctcccttccttcctctctttctctcctcctctttctctttccttccttccttctttccttccttccttccttccttccttccttccttccttccttccttccttccttccttccttccttccttcctttcttccttctttccttctttccttctttctctcactttttttttttgagtcagattcttgctatgctgcccgggctggtcttgaacccctggcttcaagcaatcttccagcttcagccacacaaagtgtggggattacaggtatgagccgtcgcacccagcctgttacttatagattctggatataagacttttgtcagatacatagtttgcaaataatttcacccattctgtaggttgtctgtttactatattgatagtttattttcctgtgcacaaactacgtaggtcacacttttcaagttttgttttggttgcaattgctttccaggacttaaccataaattctttgccaatgccgatggcaaaagggtatttttctgtttttttccccctaagatttttatagttttgggtattacaattaagtctttaatccatctggaattaatttttgtgtatagtgatgggttggggtccagcttcattcacatacactggtatgtggctagccagttatccccagcaccatttattgactagagagtttttcccaatttcttatttttgttgactttgtcaaagatcagatggttgtaggtgtgttactttatttcagaatttgctattctgttccattggtttatgtgcccatttttataccagtactatgctgttttggttactgtagacttgtagtgtagcttgaagttgggtagtgtgatgcctccggctttgtgcttgttgcttagattgctttcactatttaggctcttttggttccatatgaattttagaatagttttttcctaattctgtgaaaaatggcattagtagtttgataggaatagcgttgaatctgtaaattgctttgagtagtatggacattttaaagatatggattctcctaatccagggtatgcaatgtttttccttttttgtgtgccatctctgatttctctcagcagtgttttgtagttctctttgtagagatctttcacatccttggttagctgtattcctaggtatctattctttttgtgtctattgcaaatgcaattttgttctttagtctttaggaccctgctcaaggtcctgcagcattgccactgctgagccatgctcctgctgctcggcccagcactccagtgtcccagctgtcagcttgaacagacagctcgaacattattggtgtatagcaatgctactgatttttgcaaatttgttttgcatcctgaaacttcactgaaatcttttatcaagtctaggagcctttcggcagaaccttgagggtttttctagatatcaaatcatactgtcagcaaagacggataatttgactgcttctttccctgtttgggtacactttatttttttctctttcttgagtgctctggctaggacttccaatactatactgaataggagtactgagagtatacattattttcttgttccagttctcaaggggaatggttccagctttttcccattgagtatgatgttggctgtttgtcataggtggctcttattattttgtggtatattccttccatgcttagtttgttgagggtttttatcataaagtgatgttggactttattgaaagctgactgcatctattgacatgatcatatggttttgcttttaattctgtttctgtggtgaatcacatttattgattcatctatgttgaacaaaccttgcaccccaggaatgaagcctacttgaccttgaattaactttttgatgtactgctggattcagtttgctagtatttttgttgaggatttttacgtttaagtttgtcagggatattgactgatattttcttttttcattgtgtctctgctggattttactatcagaatgatgcagactacattgaatgagttaggaaggaacccttctcctcaatgttttgggaatagcttcagtaggattggtaccagttcttctttgtacaactggctgaattctgttgtgaatccatccagtccaggggttatttttggttggcaggttttaaaaaattattattactaactcatttccagaactcattattagtctgttcaggttttcaatttcttcttggttgaatatatagaggttattttcttccaggaatttattcgttttctccaggttttctaatttttatgaatagtggtgttcctagtattctcttagggtcttttgtatttctatgggatcaattgtaacgtctcctttgtcatttctgattgtgcttatttggaacttctctcttattttcttcattaacctacttagtggtgtatcaatcttgtttattcttcctgaaagacaacttttggttttattgatcctctgtatggattttcaagtctcaattttgttcagttcttttctgattttgtttatttattttcttctgctagcttttggctttgtttgttcttctttttctagtccttctaattgtgatgctagaatgttcacttgagatctttctaatttcttgatataagtatttagcagtataaactttcctattaacacctttagctgcaaaccaaagactctggaattttgtctttctgttttcattaatttttgctctactttgttgtttacccaaaagtcattgaggagcaagttgtttaatttccgtgtaactgtgtggttttgagagatctccttggtaatgatttccatttttattacactgtggtccaagattatgcttggtatgatttcggtatttttgaatttattgcaatttgctttatggcttcaatttctcaataattttgagattaatatcatgtactatacagaaggtaacatcatcacagattcaggaggaaagaaacgctttctgttgaagttttgatatcatgtctgaaatgagaaggaaacagcttgctcccttggatccgtggttccgcctgttgcctctagagggcgatgttgcatcaagtaggcatctgttttcatcgcagaccatcctcatccattgagcctcctccctgtagctggctgatgtagctcgttgatatctgtgtggatagggagctgtgacgagagcaagaggtcagaacacatccaggctccttaagggaaagcctctttctgtttctgaaacttttcaaagccagggacttgtccaatccaacctcctcacagttcctagctcctgaggctcagcgcccttggcttctgtccgcccagctcaaggtcctgcagcattgccactgctcagccatgctcctgctgctcgtcccagcgttccaggtgatttttaccctgggtgagtaacattccattctttttccttccacagaagtgactgtgttgtaactgaatctaaattgagacacattttttactcaaacagcattgatgttgcaggaggaaccagagcccagtctgtgacccagcttgacagccaagtccctgtctttgaagaagcccctgtggagctgaggtgcaactactcatcgtctgtttcagtgtatctcttctggtatgtgcaataccccaaccaaggactccagcttctcctgaagtatttatcaggatccaccctggttaaaggcatcaacggttttgaggctgaatttaacaagagtcaaacttccttccacttgaggaaaccctcagtccatataagcgacacggctgagtacttctgtgctgtgagtgacacagtgcctgagactgcaggagagctgaacacaaacctcctgagatgctgagactttctgtgactcaagaactcaacctgtggagctttcaagagggtcccttttttctgtgcccgttttgaaggcacatagggcagggtgggctgagcccttggtagggtttgtctccggaataattgctccaatgtcaatgtcatgccacattcagatatgctttgtcccacatggaggtttcctgatgaatttcttcagtggggacctcctccacactctgaagaaagcacatcataaggtgtcagagctccgaaataaaaggcaacaacatttttatacaaaattatttctagcaaccattatgattagtattgcctcaggtgttaacttgtgaataaccgatgtaattgattagaatgttagctaaaagctgtgcaggatggattctcaattagggtaacccatacagcacagattctcaatcagtgtgctgtagattctcaacctagatttgaagcttaacttctagcacatacataatatcccactgtgtggtattgacatatttaaagtaaattagacataatatcaagatttttaatcttgtgagcattatgcaaaacaggaaattaaacataaatcttaatacaatattgaaaaactaagctgtcaagttgtgatcttttttaaaacagctattccagtgatttccaagttacaaacttgagggataaaaatgtaaccaatataaagatatcaaataccctagattcaactactttaaaaactactttaaaactccgaggcattttattttaagagattacacagatttattatataaaattacacaacaaaaaattccagttgcattatcagagagtatatgaattctaatgggcatatccaagaccagggtaccctattacttactctgaaataattatatcgaaaaaccaacatgtttaagatattttatgtacatgattattactccaaatttttatttgtagtttgatcacatggtagaattaaaaaatgcctctcaaagtattataaaatgttcacacatacagaagttgtcttccttaattcaacattttgtaatttttgatgacaaaaattatgaaaggaatcatctcacttcttaaaaatatttacaattgcctaaatctcctcttttaaaatgagatgaagttgtattcttcccttattataaaacatgtgtttaaagtagtttaaaaatattcctatgaattgagctaaaagagggtagagggtttataataaaaaatatttagacttggcttcttctcttgcaccaaagactcaggttcttgcttatggtttctttggctgctgacattctttagttacttcttagcgtgccacctcttccagttttactttcgtcctcatttcattttcgtttgtagtttttcttacagatttgtcttttcattgtgccttttatggcctgttattttgattatgttcaaattttacaggccaagaacacttaacatgatgtctattttaacaaatttttgaagtgtacaactcagttaactattggcccaatgttgaatagcagatctctagtaattcttcatcttatctgatagaaactttgtaccccttcatcaacacctccccacttcttcttcccccagccccaagaatggtaaccaccattctactctctacttctattagtttgacagttttaggtatctcatgcaggccttctatgactggcttatttcacttagcataatgtccttagggttcatccatgtttttgcatgtggcagaatctccttttttaaaagttgaagaatattccattttatgcatatatcacattttcttcattcatccatcagtagatatttaggttgttcccatatcttggctaatgtgaataatgcggcagtgaccatgggagagaaaatgtttcttcaatatcctgaatttaatttttttgataaataaccagtagtgggattgctgaatcatatggtacatttttaattccagggggaaactctttactgtttttcataattgctgcaccattttgcagcaagggttccaacttctccacattcttatcaacattgttgttgttgttttataatagccaacctaaaaggtgagaggtaataactcattgcgatatctaatttctctggtgattaatgatgttgagcagattttcatataacttcagccatttgtatgtcttctctggagaaatatctactcaaatcctttgccaatgttttaatcaagttattaaaacattgatagttataggagttccctatatattttgaagattagccccttatcagacatatagtttgcaaatatttctttcactctacatgttggctttttttcctattgattattttctttgatgggcagaatcttttaaattttataaagtcctgcttatctacgtttggttttgttgccattgcctgtggtgtcacatacaagaattggctgttgcttagaccacatgtcatggagagtttcccatatatttttccaatagttttacagttttgggttttacgtttttaattaatattgagttgatttatatgtattatgttagctagaagtccaatttcattctcttgcaagtggatattcagtttccacagcacaatttgttgaagaactactctttccccattatgtatccttgatgcccttgtcaaccatcagctgagtgcgtatgtgtgggtctatttttcagctctctattctgttccattggttcgtatgtttgtctttatgatagaactatgatgttttaattactgtagctttgtaatatattctgaaaccaagaagtggggtgcttttagcattgtttttctttctcaggattgtttgagctattctgggccttttgtgtttccagagaaattttagaattaaaattttagttttttctatttccataaaaatttcattgggattttgatagggatagcattgtagattgctttgggttgtataaacaccttaacaatattaaatcttccaattcatgaacatagactatctttcatttatttgtgccttctttaatttttcttatgaatgttttgttgttttctgtgtacaagcctttagactaattagttaagtttacttctaaacattttaatcttttgtagctataataaatggattgttttctggattttttttcagatagtttattgttaatgtgtagaaatggcactgatgggcctggtgtggtggcttatgcctgtaatcccagcactttgggaggccaaggcaggcgaatcaggagatcaggagttggagaccagcctggccaacatggtgaaaccctgtcactactaaaatgtaaaaaattagctgggcatggtggcaggaacctataatcccagctactcgggaggctgaggcaggagaatcacttaaactcgggaagcggaggttgcagtgagccgagattgcgccactgctctccagcccaggcgacagtgtgagactctgtctcaaaaaaaaaaaaaaaagaaacggcactaatttttatgtgttgatttttataccctacaactttactggattcatttattatttctaataggcttttttggtagcgtcttcagggtttttaatgaatttatgtcatctacgaacagaaataattttacttcttttctgatttgagtacttttaatttctttttcctgtctatttactctggctaggatttctagtattatcctgaatggaagtggtgagggtggttacccttatcttgttctgatcttagaggaaaagcttttttgtgtttcacacaccactgagtgtgatgttagctgtgggctttttatatatggcctttattatgttgggggtaatttcccaatttgttgaatatttttatcataaaatgtgaagcaggttcactgtgtactggttaccaagttgtctgagtccagtgagacagaatacacatgcatacaacaaggtacatgaaacaggtttattaattacagataagcaagggacaacagaagcttaggtttcattgcaaacaggtcccccagggctcaggaaagctgtctagggtggatagggtgtcatctgcatgtggcccagttgtaccacacctgagggaccccagaaattagcatgccctaggttttagacccctgggtaatatgataccctgggccaaaaagtactgaaggacactgtttctagggggtatctgaaatacagccagcctgttccagccatttcattcctgtctgaagatgttacattcccagtacattctatagttattcttatttatttatttatttatttttgagacagagtctcgctctgtcgtccaggctggagtgcagtggcgcgatctcggctcactgcaagctccgcctcccgggttcacaccattctcctgcctcagcctccccagtagctgggactacaggcgcccgccaccacacccggctaattttttttgtattttctagtggagacgggacttcaccgtgttagccaggatggtctggatctcctgacctcgtgatccacccgcctcggcctcccaaagtgctggaattacaggcatgagccaccgcgcccagcccattctacagttattcttgagaaccacaaacaagaaagtggagagaactgggttggtccaagaccacccagagaaccatcctgcatgaaaggatgttgaatgttgtcagattctttttctgcatctattgagatgatcatgtaatttttatccctcattgtgttatgtagtgtgtcacattcattcatttttatatgttaaaacatccttgcatcccagggataacttccacttggttattgtatgtgatcctattagtgagctattgaatttggtttgctagtatttcactgaggatttttgcatctatgttcatcgggaatattggtctgtataccttcttgtagtgtctttgtctggctttgatatcagggtaataatggcttcataaaataagtttagaggtattcccctttgaattttttggaagaatttaagaaggattagagttaattcttctttaaatggttgatagaactctctaatgaagctgtcaggtcttttgtcttctttgttaggaggttttggattactgaatcaatttccttaccagttataaatctgtttagatttttttatttcttcatgattcagtcttggtaggttatatgtttgtataaatttatgcatttcttctaggttttccaatttgttggtgtataattgtttgtaatagtctcttaagattcttcttatttctgtggcatccattgtaatgtcttctcttacatttttggtttatttgaatcttctctcttctttttcagtctaattaaaagattgtcaatttagcttatgttttcaaaacttagttttgcttatttttatgttattttctactctatgttttatttatttctgctctaatatttattatttccttctttctactaaatttggacttcacttgttctttttttctagttctttgagatgtaaagttatgttttttgtttgagatctttcttttgaattcaggtatttattgctataaacttccctattagtactgcttttgctccctctataaattttgatatgttgtgtttttgtgtttgtatctcaaaacattttctaatgtgccttttgatttctttgaccaatttgttgctcaagaatatgatgtttaatttccatatattttggaattttctagttttgcatctgctatttatttctagtgttattccattctcattagaaaaaatacgtggtatgatttcactttcttaaatttgttgagacttgttttgcggctgggcatggtggctcccacctgtaatctcagcactttaggaggctgaggtgggaatgcttgaggccaagagtttgagaccagtctgggtaacagtgagactccttctacacaaaaaatagaaatattgacctagtggggtagtgtgcagatacctgtagtctcagctactcaggaggctgagatgggatgatcacttgagtccaggagtttgaggctgcagtgagtcatgatgctgtcattgcactccagcttggacaacacagtgacatcctgcctcaaaaaatgaaacaacgaaaactgccctctttgttttcagtgaccctatgcatcaggaatacactgggtcctatcagtgctccttgacaggtgtgatggaagccagtctctcaggcagcctgtggcaaagctagaatgttggatgtaatgtccaagtctttccctccccagggagaggctgaaactggggctttcctcttatttatgggacacagtactgggggtaggaaaatgtcagaaaccctcctgtcatctttgatgtggttggttgcttgctcattcaaggtactggagactctgaactagttactggatttttcacaagtgaattgatttatttattgctattgaattggtgtgtccattggggaaaagagggtccagggatttcttttctgccatctttctgatgttacacctttcacggacagaattcttcctgttctcatgggcttctttatttgcccttcaccagaactgacctcctcttgggcatctagttgaatgtggttttcactgtgggcatggtggtcctgcctgagtgccagcaggccaccctgcaatgagagctccatcatacactttaaactttccttgatatttcttttagctgtgcctcttaagcagtagaaggctggatatgaaaaccattcagataatttctatatcttaatagaaaaatttagccttttaaacttatatatgcatgcatttatggctacaactaatatttttgacttatcttacatggcatagtgacatttgacattgtagaacacttccttcctggaatgctttctttattggtttttagaaatcccactcttttttccctctgcttcagtattgtcagttgttccttctcagtcttttttgctgttttttccccacatttaactaatctttaaacattggcaagcctcagaaatttatccttgaaaatctttttcctctataaatactttattcacagctggttttattcagtctcttggctttaaatcccatttaaatatccaaacttataactgaatcccagataactcatctggattctggattcgagtatcaaataatctatttgacatcttctttttgacatcctccacttaatatatctgaaaatagtctgctgaatttgacctctatactcactaagccttccttacatcccactcgcttcttgtgaacatttcttcattttggtaaaagacaactccatttaccaaatcttctaatccccttagccaaaaactttgaaatcatcattgtcttatcacttttctcacatccccacttgatccactaggaattcctatcagccatttcttcaaaatatccccataatcaatcagttctcatgacctttactgctaccactctgatccaagccacagtaatctcttgcctagttgattgaaagaaacctaactgaacttctttcttttgccattgttcctcttctgtctgttctccatgcagcaggagaagcaatctctttaaaacataattcagataatttcatttctgtgctcacaactatgaaatgtcttaccatctcactcaaaggaaaaccaaatgctttactataatatacaagtccatttagctccctgccatatctttgacatttgacatcagctaccaccttcctacttactcccactctccagcctcaatgcacttattgttgctctaacataccaattattttcctgcctcaaggtctttgcagctgctcatttctctgccttgtgtactagtactccaggtaaccacatggcttatttctacactttattccaccaaatagccatgcacaaaatatttactgcagattatttttgtaatagtgaaaattaaaacacaagatgtttctcagagaatggctacagaaactgtaataaatctttactatggaatattaggaagcaaacatgttaacatcaataggttatcaggacatataattgggtaccaaacacattgcaaactgctgtgtgcttgaaagttatagtcagacaaaaatttaaactgtatatatattgagtatgtattcatccatgtgttctgcaataattttaaattaataataaaaaataggctccaatttctttctacatctttgtagaaaaaggctccaactccaatttctttctacatctttgtccatttgctcttctttcattttcatttagtaagggcctctattcaactcacaagcttatttagcttcttgattgcattctgttttatcttttctaggaacagacaacaatgatcatattcttaaatctttgtctaaccatcctttgttttaagaaatggctccttatttctgggttcattttgtactttttgaggtgttacttgatatatatgaaaacacacacatgtgcatgtttgtctttcccactaaactgcaatgtcttgtgagtagagaaaatgtcttactaattttttaatttcgtaagacctagcacaagatctagcttacagtagacctcaataaattactaaagacttactttgaaataaattggagaaatcacattaaaccttgaggaagcaatttgataaaatattttaatatggtaatctcttgtacatggaatttggaggaagaaaccagtttcctttttttaaaaaaaaaaaatcaccataagcctgacagtttttttgctcttgacaatctgggtggttcctcaggaaagaattgggatgaaggctctgggactccacagatgagttagtgggcctgatggtttcagaccactaggaggctctctaggctttactctaaatgaggaaattttccctcaagttctgagatagctgactcagcgaaaaactgagagttagcatcagttagcaaagcatctgaactagtcatatatgaaacggacagggggagtctccatttattcatctgcaaagatgttctgtggctgtgatgggtgtcacagagacggtctcccaagaagactgatcttagaaatcaacaagggaaatgataaagctggaagccttacagctttaatttttatgactaaaacttctaaaatatgagtctccattctgactttgaaattatttcaataatttccaccttcttttatacctcctttgaaactagaaaaacaagaaaaaggaaatgagaagaaatgagaaaaaaataatgaaaatattcagagagaggataaaagagagtaaaagaaataagaggttgggggaaaaaaagatgacacatttaactgaatttcaaaatgtggtctatgcctcatatagtttctgtgttgcaaggttaaaaagttctagagatctgatgcacgacaatgtgaagatacttaccactactgaattgtacatgttaaaatagtcaagatggtaaatttaatgttatgtgtttttttaccacaataaaaaatgtgacctctacctcttgttcacagagcagaattgaccaggtggggctgcaaagtgaatggagaagtgttggatagaagaagagagatggaaataagctggggtggccatcatatacacgtgctatttctctatcaaccaaagtctcactggagacattttatatgttcatgatgactatatgtcctatgttaacagaattctcttaatttaattgtattgtatttactcctttaagggtgattaaataaacgatgcattcgatgagatattctttctttgtgagagctttcttataaataaaatcacaatcacttttcaaatcacatgtcctgattttttggctaaggaaattgggccactgaccctgataattttttcaggctgtacttgatccagatgaggctcccatttgtctctgagatatcttttccctttcttcactcccctcctgacttgtccgattactgggtactttaagtggaggcaatcctgagagcataaaaacctagacatttctgtgtctctagtcagcagtgcggcactcagcagggtactgacgtcagcaattacgcccgtacactgcaggaaaactagaggaaaatctctttgctccctgatctcattgtattccacctcatttaagtaacagcatatctcttacttttttctcagctatttggaggccagaggagagactttctcaagagaattagttttcttttttagaaaaaaatatatctgccggagacgctatctccatgacccatagttttctgctcttaatcccggagcttctgtctacttgaccccagatttatatctgaccccaaaatgggacacctcacttgagctctctcaacacagcttgactgggagctggagaaaatctttggttaaggaccagggattggggactctttcaatctaccatttttctagaatttccgtctttctgagccaaatgattgttcctttttttatggccttcttttcttttcttttttcttttttttttttaaagtgtatagaactaaaatcccaaagggccatttcctgtgtggggaaggtcagaatcaatgatggtggacggaaaataaaataacttgatctggcaatgtttaaacatttcactaaaatatctgtgtagaaatttaaatttctatgaagtgtaatcgatcaatattttttcttatgttttttgactgttatgcttagaaaatccatcaccattctaaatttattttaaaaattttttattttacttaaaatattaaatgttacgtcctttgaactttatttgataacaggtattaaggtaggcatcctaacttatctgttaacttccaaatgattgttaggattgcacattttcccccattttaactaagtttccaaatgtatttgtatatttgaactttgtattctacttcattaagccctatatgtggattttaaaaataacattctattgcaattagtatagcatcacacttttactgaggaggaaattctcattctctgaatttgaaggcttcctgaagcctgagttagctgcagtattgtatttggcctctagagagagatgttacacaaattgaatttgatagccaaaaacaacctgatctttttgaagaatagcttttggctatacatgccgggtaaactcatccacctctctgtcagagtgtctatgtggctgaatcgtttccagaaaagacctccagaaaatagcttcctgtttctccacaggtcagacatgaagcccaccctcatctcagtgcttgtgataatatttatactcagtaagtaaagcctctttttgttctatttttctatggtattctgatttagaataactttaatgaatattatccccagtctgtaagacttttcctgatccagaattggtgttataggaggaacaagagcccagagagtgactcagcccgagaagctcctctctgtctttaaaggggccccagtggagctgaagtgcaactattcctattctgggagtcctgaactcttctggtatgtccagtactccagacaacgcctccagttactcttgagacacatctctagagagagcatcaaaggcttcactgctgaccttaacaaaggcgagacatctttccacctgaagaaaccatttgctcaagaggaagactcagccatgtattactgtgctctaagtggcacagtagctggttttgcaaggaagcagaacacaaaccctttaaatacaggaaatatttctttgcaaactctctgtatggccacagcagggcattctttctccagaaattaatattgagtttatctcgtagatattatatcatcagtcatcagttagctatagattaacctcataattttgtccaaaaaattctcattatttaccctgcttaaattaaatttaaaaatagtaaatgtatttattttgtctagtagtactggaaacatactttcgaaataaaaactatattgcactgcataaaaagtattcttttctttgttcagaggtactgtccaggcttccatggtgcagtcctacctcttcaactcctctgctgccccacgtgatccccacatgtggttgtcaccacatacctgagcatagttcctcaaagtgctctgctgtttcatggcttatgattgttcatctttctatatctattacccttctttccatgagtttcatagactcctcctatctcaattggtgtccagccaggaaaaaagaagcccagtgaagtttaatataaagatttattaaataataataagtaattaactactaatgggtaaaaaaacctctaaggaatataggaatgcacatgtaagcagaagttcctgtctctaggactaaggtagaatcccaggaaaggaacagattggcataagcatgacccctcctgccaaggctatgattcagatctcattgagagtgtgtagctggagcttgctgcatagtggagtagtttgctgaggtgccagagaaaaatactgacaagcagaaaaatacctaccaggattacaacacaattcatgggaagcccgcaaacgagtgctgctgaacttgcttgtggtggctgtgaaacttgccaagaaaccacctgtcgggcttgctggaggggagtgccactggtgtcctacaggccaacgaagcatagtggacaagaagtgtggaaaacataccagaaccaggaagagaagcgtcatccttctgcggggtccttccagccccctctactgacaaagcttaatatcaaatatttagagggtccagatccagttcacaaatagggtaattagggtggatttggagctgagaggtaatacattgataactgtcacaccctatcccttgggctactgatctttcatatgcattcctttttttctttcttctttctttttttgagacggagtctcattctgtcacccaggctggagtgcagtggcgcaatctccgctcactgcaatctctacctcccaggttcaagtgatttttctgcctcagcctctcgagtagctaggactacaggtgcctgccaccatgcctggctaatttttatatttttagtggagacggagtttcaccattttggccaggctggccttgaactcctgacctcaggtgatccacccgcttcagcctcccgaagtgctggtattacaggcatgagccactgcacctggtccatatgcattcctatatgcacatttcaacttccaaacaatagtgaaatgacactatgttgctacctaataagctgaagctgtccttgaacaagtggagttttcattcttatctcccaaatgagatgatccatagtcccaacaaccactgtatgaatccctgactgtatcagccacatctcaagttcagaggaagttctactgaatatgctgttatatacagactaaattataaagctaatctccaataatttacatataaaataattatgataagaaagagagaataaaatggcagcatatacaaagaaacacttacatataatgagcaaagataaaatacagaaagctaccacattccttgattccagacttggtcctgggcttcaattgacatagacagcttccttctcttgttacgtattttatattcttctgccctcatccacgtcatcggtggattggagttatttacctggtggaatgacaaaaatcttcattctcgaagagtctgagttctcaatagtcatggcttttaatttgttgctgcaggtttcccttaacttttactattgggcacgaaagtgccattaggctcctcaaaaaaatcccccgggttttagatgtagctctctctacatgtgttgtatggcttctggagctactcgcccccttcctaacaactttgcaacatgttctggtaaccatcacggtatattaaaactttatcgtatctcctcttcctgttgagctgaatgttccagagaagggccgttatgttctctctggctttaatctaaccttctaacacagtatggagcacacaatatgtacacagtgaaggaatgttaaataaattcatttaaacaaatagaaaaatcagcaatcctctcctgtgagcatgtgagtcaacctccactaatgtgatttcactggtttcttcagggaaccgtgtcaaaccaattaatacaggcaaacaatatgttcatctgggcaaacagatgcctaatcaggttaagagttttcttaattggaaaaatagcttgcttatgaagacaatagttttatcaataaaactcacctcaagaccttcggcacatcattgtaccaatcctaaactcgtatatcatgaactagagaaaatagctgagaactagagctagatagtgagttcttggacatgcacacaaaaagtgcagtctataaaagaaaaaaacgataaattagccttaaataaaattaaaacctttggcattgtagaaagaccttgttaatagaataaaaggcaacctatagacagagagaaaatgtttataaatcacacatcagacagaagtcttatatctacgatgaataaagagcacgcaaatctcaatgtaaaaaagaaacaaataaataatccaattagaaatagaatagatatttcaccaaagtagaaatatgggtgaaaaataagcaaataaaaagatattcaatatcattcttcactagcaaaatgaaaataaaaatcacaatgagatatcactataaacatattagaacagctaaaatacaaaacagtaataatactaaatgttggtgagtatgtagagaaatggacacttttatacattgctggtgggattgtaaaatagtacagccattctggaaaataatctggcagtttttttataaaactaagcatgcacttatcatatgatcacaccattgtgcattggacatctatcccagtaacattcacataaagtcttatacaacattcatagtagctttattcataattgccaaaaactggaatcaacctagatatttttcaacgggtaaatggttaaataaactatcatagttcataccatggaataatatgaaaaaaaaagaacaaactgttgatacatggaacaacctgtatgggtcaattcccaaaggttacatacagtttgattccatatatataacattctcaaaataacagaactataagagatggttgctaggggacagagattgggcatgggagggtgtttgtgcatatagagggttaggatgagagaattctatgttgatggaacagtctgaatcttgattatgttggtggttatatgagataaaatcaagaaccacacacaagtatgcatgcacacacgtggagaaaagcaagaaaatagtgacaattgaatactacctgtagtctagttagtggtatttgaacaatgtcaatttcctggtatttatattgaatttcagttatatacgatgtcaccactggaagaggctatgtgaagagtacatagggttctataaactattttggcaacttgccatggatttataataatttcaaaacaaatacagtactatagtttcaaaaattgcattctttactctcaccaccaattttatcagtaaaaccgctaagagttgggaaggtgtgaagccgatggtagtggatgcaaattttccaaaattctaattttcacttggaagctcaaatattatcatgggtgacaaccactattagttgttttcctcaaaatggcaggctcacattttatcattttcaagaacataccttccaactacccaaatctgctgttctgtcactcatgccttcaagtaaaaaaaaaaaaaaaaaaaaaagttctatgagaaacagctagtttagctcacaactcaaacaatactccagtgtctttctctcttgaggcaccactgtgttagtacaccacagatgaactttatgcatacgtcctatgtcatcacacagaatatttaaacggtgtactctcaagggtcaagatttaatttaaaaaattttgcttctacatctaggacattgttgagtaaaatctttttctcttgccagtgtggtggtaatgattatgtacaatgactactagaatattttgggttcatttattttacctgtgttaaaacatcagcaattgcatttgcttcatcagtgtaaatgtcaacacagtgaaagactcaagtaatatcagcactattataaaaatagttttattctacctcacagttttaactctatctcacagttttcccaagaggtcagcaatatttctggttactttttgcagatacagctaaatacatacaaatattaaaagtactatattcttgacctcctcattgtgagacattagacacatcatttaatttctttgaaccagggtacatcttttaactactattctaaatttgctcacagactgtttcaaaattatctggaagagagcagacagattaaaatttcagtttgttaaataacactggttctttgctcaaaaagctttcatatgtctttatttcgcactgaaaaacataaagatttattttggcagtcatctgacccagacccttcctctagacttatgtcttggaaccctccaatctacatattgctctagccagcaatctcttcttctcatttctttttttcctttctctgttctcctgtcttctcatctttcccatctctctctctgttttacacacaaaataccttaaaatcaatttttgggaacatttataaaatactctagaagattcttgctattctttttgactgctctgcatcaggacccattttcttataacaataataatttttcagtcactaatgaatgtcaggcactgtgctaaatgacattttatgatctcatcgttaaccttcaacagctctgaaaaggtagtattattatttactcatgatccatgttctacagccaagataatgtaggcacagaagacagaaacagctactgaactgatagatgtaaacctgacttcgatggcctgactataaaacttcctctcttcctggacccgcctgcctcctgccatagaaactaaaacttctaggtattcactgctatgggctgaactgtgtttccacaaaatgtggacgtagaagcgctaacccccagtacctcagaacatgactctatttggagacagaacttttaaaggtaaagttaaaaggtggtcttgagggtaaccactaatttaataagactggcatccttaagaggagattgggacagatagcacaggcaaagggatgaccatgtgaagacacaacaagaaggcaaccatttatgagtcatggagaaaggcctcaaaagaaactaaacctgccagcactttgaccttgaaattgtagtccctaaaatcatgagaaaataaatgtttgttgtttaagccatgcagtctgtgatactttgttatgggagccctggtaaactaatacagcctactggttaggcttgatgtgggcacatggcttgggctccaacaattagatgaattgttccctaactttcactcaggagttacttttgcaaaaaaacaaaaacaaaaaacaaacaaaaaatgagtaagagtttcctttttgagagtggtggtaattgcaacaaggtggacatgagagtttacaggctacaaggcagtggaattgtagctgcatacattgtcctgcgtgaacagtcttgcataaactacgggcagtatctggagctcaggaaaggagccagtgggatactcagaggagtgcttctccagagtgattttctgtactgctgctgacttcatagcttttgagttcagttctctgaccctactggagattctgaggtaaatccagtattcattaatttattccttttctacttaatttaggcagagtccatttctgttgcccatcagtaaaaaccttgacttgtatataatctcattccagggaaaattttttaaaaggaagctcgtaggtacatgatcagaggtcatagtaactacagggaatttaacagtgcttctcagaggtagtctgaaaatattgagcaccaactgtctttcgtagttgagttcttacctgaattgaaatgtatctgttcctattctaagttagaattagatttcaataaaggcagagactggaatagctttgtaatttcttctgagtcagctctgaacacacgtcctgatggcagcaggatgatgttacgatcacaagagggcagtgcctccctctcctcagactaacttggctttaaatcagcctatctgcattgaaaggaaaggactgagcttgcctgtgactggctagggaggaacctgagactaggggacagaaagactagggattcacccagtaaagagagctcatctgtgactgaggagccttgctccatttcaggtcttctgtgatttcaataaggaagaagaatggaaactctcctgggagtgtctttggtgattctatggcttcaactggctagtgagttggggattttggtgatgggaatggcaagaccaaattttagagcccacagggctgaggggtgaagtgttcttattaatttggaaatgtaatttgaaaatgtaatgactgactcctggtcccggacctgtgtttctgcctaggggtgaacagtcaacagggagaagaggatcctcaggccttgagcatccaggagggtgaaaatgccaccatgaactgcagttacaaaactagtataaacaatttacagtggtatagacaaaattcaggtagaggccttgtccacctaattttaatacgttcaaatgaaagagagaaacacagtggaagattaagagtcacgcttgacacttccaagaaaagcagttccttgttgatcacggcttcccgggcagcagacactgcttcttacttctgtgctacggacgcacagtgttccccaggaacctgcagcctctacgcaaaccctgccaaagcagcttcttagaagccctaatagtgggtagaattagtggttatgtctttcagtcaagaagagtctacaaacagctggcaaagtaaaaggggaactctttcaaattcgtgattttttaaaaagcatcttggactaggggaaaaggcatgaaatttggaacaggaaatggaaatgccaggctcagttctgctaatcctggctacatagggacattgtcagtgtagcagccttcaatttcctcacttgaaataaaggatatggatcaatgagcccaaaatattacttaatccctaattttattagggaaaaaaatcactgggcacttgtggaagaggaggaaggctgcacagttttagaaggtctcatttgtcctatgtgcagccctcccaagacatcagtgggtctttaaggtgcatgaggtggctcttaggttcctctaattcttgtataagaagcagtagattcattaagcattagaattggaagaggtcctaggactctcaaccaagcttttcattttagagctgaggagtaaaaccattgcataataagacagacaattttctgaatctttggagtgatagtgacaaatatctggatctgatttcaccatttattagttgtatgattcccaagcttcaatgtctctattaggcaaaatgggaatttataagaaagtaacaacttttccccatccaaaggagagataggtgtttgacactaccaggtcctaaaacgctgtgttttgaaagcaggcatttttagtaccaaatacataacagtttttcagctatttattcttgctcctactgagaaataaatactgactatagttttcttgacacagtttagatactactgaaaatgtgtttgtggagaaaattagagcatttgtatttaggttcatgctttggtgagaaaagtgggggagggcagggaaaggttgtgtcagaccttgacccattaatattagctgtaccagaatcactagagtatctttaaagatctggactattaagctcaattctggcttactcaatcaggctctgataaagtgatgaatttcaattgtaatgaatatcttctatatatgtaagagattggctcaggttcacatttaaaaaacccaaacaataatgtttgtaacaagattgacgagtttttttccacataaaggagctctgtaatattcagggctggtgctgtagcttcatcatgttacaaaggaactagggtctttctagcttactgtttttcactcttaatgtgtcactcttttttttacactttcaagagactgatagagatccttccactttatacaccttccagactgaaagaaggagaaagtcaagggcacatgtacatgctggctgagtcagtcttttccagaagctccgcccaatggcttctgcttacactcatttgctagagtggtattcgatgtttccacctcctcctatctgcaagggaggctagaatatcaggattattatctaagtatatttctattcacagcaaaatttgggttctattagtaaaaaaaataggtgatgatggacattttacagacaattagaagtttctgccagaccctcagtttaggacatattaggactcataatatttttggttcatagttatttttgaattaccatatccaatgtattttcaagttctattgagtgtaccacctactaagttttccagaagacattacaacctctataacctaattcacctccacacccaaatttaaaattctccctaatcgcttactcctctgcccccagcaagcttgacagaccccatcacttctcagtatagtgctttgtacacagtgagggtgaccttttcagagtgcaaatttgaccatgtcaaccacctgggtcctcactggttcttagagtagaaaaaaaattgcttcatgtgatttacaaaaccctccatgatttagactcttaatacctctccagtatctttccacaataagctcctaatttatctttttcttcaatactggtcctatctacgtttcttgaatgcactttgtttatcttatataaccccctcaaagcaattttaggatacattcttactctttttaaaaaattattttctcttcccttgagagtagagcccagtaaatgcctacttgttctcatacgtctgttcaagagtcagtaatagaagaaagctcaatacgctttcttagaattgtggaccactgcctttttaaatgggcagtttctccttttatttctttatttaattaataattgtctctattattactctatgtgctccttaagggcagggaccattatctgtgctgctcagccttgaatctgtaacaccaaagtaacttaagcactaagataatcaatttttcctcttctttcttcctattaatttatttaatataatatctttattttaagcctcctctaagagttaaaataatgttgtagtaaaagaacacacaagaggtcgggcgcaatggctcacgcctgtaatcccagcactttgggaggccgaggagggcggatcacgaggtcaggagatcgagaccaccctggctaacattgtgaaaccccgtctctactaaaaataaaaaaaaattggcagggcatggtggcgggcacctgtagtcccagctattcgggaggctgagtcaggagaatggcgtgaacccgggaggcagagcttgcagtgagccgagatcgcgccactgcactccagcctgggtgacagagcgagactccgtctcaaaaaaaaaaaaaaaaaaagaaagaacacacaagaaaatagggctgagtttttcaaactatagtccatgggtatttggaattgtatgaataaattgttggtgtataatgggggtcagaaaactatggcctagtgttcaaaacaacctgccacctatttttgtaaagttttattgcaaaatagccatgctcatctatttacacattgcttatgatggcttccatgctataacagcagagtttagtacttgcaacagagagtgtatgatttcaaatatatactatttgtccttttatagagaaaagtttaccaatccctgaggtatagaaattaaatgagaattattagatctgtgtgcttaggacaatgtaaaataatgaaggtacatttctaataatctagatgactaatagaataatccccttgaatttgatttttttgtcacttttaccaaattaagggtaaatgggataataatactctacaaatgaagacattgcagctgtttaaatggtgaaaagtttttggaaaattttggttatgatatagaacatagcacatagcactacagatgtatcacatagtactacagatagggcacactcccaagagcctgcatctttccattgaaagaggatgtgttgcaaaccttcattgtttgtatgcatcaacgtgcaattcaatagacataaaagtagcagtaaattaaaaacatttttttcagtgctgaattcttgggtgtttcattaaataataaaattgtataatggtgactgacatgagtatttctaaataggaaaagtgaagaaaaaatcctagtaatcactaatcacaataactcagacaatagcacatcaagctccaaataactttaatcaaatcagttattcaactgtacacatccatagctttcttttaataagtctacactaaccgttgagtttcagtggaaaatcatttcttacactaatgttttaatttgaattttatcgattttatattttgtttgaagtttttgtctgatttggtaattgtataaaacctgtgagcctaaaaagttgatacccaattttattgttgggtatatgaaacaccgtaatattaaaaaaaatggttagtatgagagtggctccttataagaagacctgcaccttactcaattttgaagaacacggaatgcacctgctaccaggccctggatctactcctaaatgaagccagtcacaccaggggcctaagacactagacacatcttcccacagactgtccttcatcaaagataattttgcccaccagatacagccattcattcattttttccaccaatttttaggggttttttttgagcatttcctatgagctaaggttctaggaaaagggctgctgatagtaataggattcaacttctgatgcaggagcactaagtgcagcttgagaaacaggacagaaatgattctaatatgatgtgataggacagaaaatatggtgggaaaaaggagagcactaactcagctcgagagatggcagaatgttttcacatggaggtgatgcactggttttcaaagaatgaacaggagtcatccaagtgaaagggagtggggagaaggaagggcattctaagcagaagtgctcaccccccggttttgggggaccagtgggaaatatgtcgagaaaaaaatctcacattttctttttttttatattctcaggatatcctgagatgcctaaaactaaattaacacttgttgtgaacacattagatgcagggaatggggagattcaagggaatcatattgctctgcgccttgaagaaggcgacaggaatcacccacacgatgaagtcagcagagtgtttgatgctccttccttgagtcccacccttcacctcggacaccgttttctttctgagtctgcaggttaagccgcaccccagggtgaaaatgaacatcattctgagactcagagcaggcgtcagggacagagaggagcctcaagagggcgctgctgccttcagcttgtggtttgacacaaatttcatctttccttccttcgcacgtctctttgttccagcctgtggcctgatcttgtagggcagtttactctgcttaacacgtgagtcaagattttgtagaagattccgccaaagactcaacaacataaagaaatatatatacctttcggtttggatatctctcaacaaaaccttctactgcttctcagccagccatgctgtctgcttcctgctcaggacttgtgatcttgttgatattcagtgagtaatgtttactcaaaacttctgagatgttctattccttagctttaggatgacctttaaccccttccaaactggagaccatgcctcttctattgccactataataaagtctttcccttttttaggaaggaccagtggagactcggttacccagacagaaggcccagttaccctccctgagagggcagctctgacattaaactgcacttatcagtccagctattcaacttttctattctggtatgtccagtatctaaacaaagagcctgagctcctcctgaaaagttcagaaaaccaggagacggacagcagaggttttcaggccagtcctatcaagagtgacagttccttccacctggagaagccctcggtgcagctgtcggactctgccgtgtactactgcgctctgagagacagagtgggagggactgcagcgagagcccagcacaaaccctggggaacgcaggtggggcctgggtgtgagccgctttgggagatgaatgaatatggactcttgttcgctgggaccccaaatggagaaaataatctcatatttctctgcatcaaagagcacaaaacagaaatgtgggcccctcacacatgggatgtagctcaccacgagaaacttttcctaatattctggagttctgtgagccttgtttgtcctttgtctctcctgcatgattctgtgagttttacacataaaaatgcaggttttgcagggcctgatgcttctttgatttctggggctctctttaagaaaaagaaaattaaattataaatttaagtttctaggttatgcggtagaaaggggccttaaaatcaaagccgaatatacttcatagtaaatctgcatttgaggttacatagagatgatcttctttaagactgaaatattataatagtcttagtttgtcctgatactgggaggttccctaactccaagtcctctttcccacggcagcactagaatcactttagctatcattaatatgagtattttcacttctatctttaaagaaataacagctttattgagatataatttgcataccttaaacttcattcttttaagtctacaattcagtggttttagtatattcacagttatccaatcattattgtgatctaattccagaacattttcaccacctcataaggaaactctgtgcctactagcactcacccccattcttttcttaccctagccataaatcaaataaaaatattgatttatgaggaataataacacaaaattttgatgtacccagtcttattgtaaatacaggacctcttatgaacctgtatctagagggatgaaacataagtcccaacatttaagactgcaaagagtttaatgactgtgatgcaggggacaaaagccagtggagattgaactctgctggtattttaacaggatttctcttgtttttggtaatgctttggttacaaattatatatttttgggtgtttcccatcctaatctccaccataattaatatgcatggattggaatagcaaggggattttcaagaacacacatattgagttataacagaaactcctgtctttgagcagtgagtagaatttctggaatttatttttgtttacacacacacacaaaatatgtgtgcaaataaacatgtaggtatttttctctggtgttactcgacatggcaaacactgaacagatttggtgactcaggaggtatgttgtgaaatcatttattaacaataaaactatttctttttttattatagtttaagttttacggtacatgtgcacaacgtgcaggtttgttacatatgtatacatgtgccatgttggtgtgctgcacccattaactcatcacttaacattaggtatacctcctaatgctacccctcccccctcctcccacccacaacaggccctggtgtgtgatgttccccttcctgtgtccatgtgttctcattgttcaattcctgcctatgagttagaacatgcggtgtttggttttttgtccttgtgatagtttgctgagaatgatggtttctagcttcatccatgtccctgcaaaggatatgaactcatcattttttatggctgcatagtattccatggtgtatatgtgccacattttcttaatccagtctaccattgttggacatttgggttggttccaagtgtttgctattgtgaatagtgccgcaataaacatatgtgtgcatatgtcctcatagcagcatgttttataatcctttgggtatatacccagtaatgggatggctgggtcaaatggtatttctagttctagatccctgaggaatcgccacactgacttccacaatggttgaactagtttacagtcccaccaacagtgtaaaagtgttcctatttctccgcatcctctccagcacctgttgtttcctgactttttaatgatcgccattctaactggtgtgagatggtatctcactgtggttttgatttgcatttctctgatggccagtgatgatgagcattttttcatgtcttttggctgcataaatgtcttgttttgagaagtgtctgttcatatactttgcccactttttgatggggttttttgtttttttcttgtaaatttgtttgagttcattgtagattctggatattagccctttgtcagatgagtagattgcaaaaattttctcccattctgtaggttgcctgttcactctgatggtagtttcttttgctgtgcagaagctctttagtttaattagatctcatttgtcaattttgtcttttgttgccattgcttttggtgttttagacatgaagtccttgcccatgcctatgtcctgaatggtattgcctaggttttcttctagggagtttatggttttaggtctaacatgtaagtctttaatccatctggaattaattttcgtataaggtgtaaggaagggatccagtttcagctttctacatatggctatccagttttcccagcaccatttattaaatagggaatcctttccccatttcttgtttttgtcaggtttgtcaaagatcagatagttgtagatgtgtggcattatttctgagggctctgttctgttccattgatctatatctctgttttggtaccagtaccatgctgttttggttactgtagccttgtagtatagtttgaagtcaagtaccatgatgcctccagctttattcttttggcttaggattgacttggcaatgcaggctcttttttggtttcatatgaactttaaagtagttttttccaattctgtgaagaaagtcattggtagcttgatggggatggcattgaatctataaattaccttgggcagtatggccattttcacaatattgattcttcctatccatgagcatggaatgttcttccatttgtttgtatcctctttgatttcattgagcagtggtttgtagttctccttgaagaggtccttcacgtcccttgtaagttgggttcctaggtattttattctctttgaagctgttgtgaatgggagttcgctcacaatttggctctctgtctgttattggtgtataagaatgcttgtgatttttgcacactgattttgtatcctgagactttgctgaaattgcctatcagcttaaggagattttgggctgagacgatggggttttctagatgtacaatcatgtcatctgcaaacagggacaatttgacttgcgtaataagagctatctatgacaaacccacagccagtatcatactgaatgggcaaaaactggaagcattccctttgaaaactggcacaagacagggataccctctctcaccacccctattcaacatagtgttggaagttctggccacggcaatcaggcaggagaaggaaataaaccacgactggcaaagtagtaacaaagattgagactaaaagttttgccttcctgctagaaagtgaaaactccgtatggttagtttgtaccttgattctatctggagaaaaagacatatgtaagaccaaaaggtgcataactgtatcatcccatgtattcactatagctcataataaattgtaagtctcacattttccaccaaagatgaattaactaaccgtgattcaattttaccactgtatatttacagtccagtaagttatattgagacaaaattggtacttaggacagtctagcatcttccatctctacaggaagtatgtgacatgacacagtcaaactcatcatatatctgttaactatacttcctgtaaaaggcagaagcctcacacagcccagtaactttgctagtacctcttgagtgcaaggtggagaattaagatctggatttgagacggagcacggaacatttcactcaggggaagagctatgaacatgctgactgccagcctgttgagggcagtcatagcctccatctgtgttggtaagcgtgaccactagcacaggacttaggctcctgttagttcagaaggatgtggagagaggcagatctttttagtctaatgaggcttagaaagaaggggtaaagggcaatgaaatcagagcactaggtctgaagccacttaatctattttatccccagagttacaaataagggatcagtctattttttcctctttttcacagtatccagcatggctcagaaggtaactcaagcgcagactgaaatttctgtggtggagaaggaggatgtgaccttggactgtgtgtatgaaacccgtgatactacttattacttattctggtacaagcaaccaccaagtggagaattggttttccttattcgtcggaactcttttgatgagcaaaatgaaataagtggtcggtattcttggaacttccagaaatccaccagttccttcaacttcaccatcacagcctcacaagtcgtggactcagcagtatacttctgtgctctgagtgaggccacagtgagatgggtgcctgtgggagccctacaaaaacctcaacaagaggcagggctcctggggagagactctgtcacagacaggaagaagcaaggagggtctgtgtcagcacaggtggtttggcaaggaaacctgagttcaattcatgtacaatgtctagatataacatttattagaagcatgtgtatcttctattctttagaatagattaagacagaatgtatagcacatatttttatatcacatatagaattatgcaacaaaaagtgcaataacaaaatatattaatcttgtgttggttttattgagggtgggaaactatccaattatcttcagaccaaatggatgattccattcataagctgttaagtttttagaatcacttatacatttatgcattaattactatgtagaatgctttaatccaagagtaatagaaatgcctttcatcgatttttcttaagaatggtatcagtactcaatgaggtaaaaaaattaaatttaaacttctttccataatcatgccagcaacctcttgtatatcagaatagatgcgaaatgtttctcaaatttcctttctctggctcctctgtttttgtgacatgattatgatattttaaaagtatctaaatattttgctgtcatttagaggctgcctactaagagagatgtctaaggtggaaatttgtcctaacggattgaatatcttgctttcaccctttcccctttgagttctggccagtttgaagctgagaagtggttagggccagaattacagctgccatggcaaccagaacccacatggtgtgtccagtgtctacttcctgtctaaacacatatttctccttggatgttacaacaggtgctcaggaacaaggatttttatttcttttgctccacacaagtttttagaaacctgagtttttaacattaaaagaaaacagacatcacattaaaaaccagatttctagcttacctataaacatgggaagagctgggaaacactacactccctggggtagaagtcaaaagttctgtttggacacataatggttttgatgtatatgtattttatttttaaaatttatgcaaatttaccattcatttcacagtatgaattaatttaaaagtaaaaatttaaattattagttacaagacaagctaatctgcaagacaaacaaatctgaattaccatttcatgaaactatacctggttttccccccatgatttcatgtatcatgggtgtgtcccagcttgagaaccttaagtatagtttattcttaattcaggagacatttgtagctatagtaagcattggagaaacattagttaataagacagacatggctcctgcctttatggaggtcatgttctagggggctatatccactatagaatggtaggcagagggaactaaagttttacacaaacaacctatgtgaccttaagaaagttataactcccctgaacatgttctctcatttgtaaaatgtagagatttaattaggcagttgctattgaataatattttccaaaattttactagcctcacaagagcacatagtccactgcctttttgagttcctaacacttactagctgcccttcttttttgggaaaggacaattagttgttatagacatattcatactgttccacatgttgcatgataatgtaacagtaataacaagaagccaaaggaagcaggcagagaggagagtggcttgggaggtcatctgctttccatacacagaagctactgttctatgtagccgggcagcagaggaagagggagaggaagaaggcgagagggagggagaggagaaaagaaagaaggatgaggaggagaaggaggaaggggacaggaggaaggcagaatgagggatagagaagagatgaagggaggaagaaagaaggaggaaagcacagaacaggtactaattcgaaagtaaatatgtttatttgaattcgaagtttttgtttctttcacaaggcattagacacactttctttcctcagcatgagagaatgagaaaaattagaagattcctatttgacaagcatgaggtcacactgaacttggactagctggctgaaactccagaggacacagctcctccagttaagctctaaggcaggttgagagacagattttctagtaattctggttgtcccttgtaaaattaatataattcatctgttcctaaaggaactaagaacattgtaactgggaaaggttccttcaatattagagttctctctagagctaagtagcaaatgcaaatgctcataggtgcctagagtagaatgaaatgagtgtggttgtccaagtgtttaaaaaggtacaggcctgataatgtgtcactaggcactgggccttggcatcagatgataaacaaaaatgatgcagtaaaccctcccattcttctcctaagcagagtgggtgtcctgaaaggttatccagagattgaagctgcgttgtttgttcctgagtcctgtcaaagtcaggctacaagctgttagatgtagacaggccattgcacaagagcttttatacaggaagcttctggatgaggggctggggagatgaagccatcacagtctgcaaggcagctgaggcttattccagcctctgtgaataaagtcaatgataatgaccattaggctccagcccctgctatttcctaatgatccttatcagggaacctcttcaggtgttccctgaaattagtcaccctcataccccacatctcagagcctatgatcttgcatacgatggatgtcttcactgcagaattgttccagtatccctgggctaaagtttgactgagttcaaataaagcatatcacacacagagagagctggttaagctaatgagctgtccagggttatgtaatcacttggcttacataacttctggacatgatccattgtcataagcatttttttttaaaagaatgaaagcatatattaggcacatattatgtgtgatacaaagaatctctgaaccttacttcttatccctctttattacatgtagtagttgccttctccatgacccctagtacaacctgcttaccatctacatcctttgtgtgtttgccctcatttccatcttctacgacacaataagacacaagttcaacagctcagtgctgttccaaccccagatggtagcattaggagcctttccacctgatttcataattaaagtttccttttctttggaaaagaggaaatttccccatcagaattggacacccttgggagtgaacagtaaattgtcaaatatgtactctcccagaagtagagtggaattcttgatgtttcccaccatcgttattacacaacctccagtctctttcagaatttccaaacagagggaaaaattaggtggacttgaaatagtaactcaatccaacagatttcccacattagtgaaaaatagctttgttttctgttcactgtattaaacaaaatactgccctctagacccaatcgccaatttatagtaagtacaaaggacagcagaacatattaaacccatcacaaatatacagtaagcaaaatctatagtgtgaaaaactctgcaagacaaacaccctgggtctttttttcttcccacaataaactacaaagaatgagtaaggggatctatggattagaagagcctttaaaaaacatatcgccagaactttggctttcccagtgccccatgcttgcaccatgtagaagtgcaagcagacgaaacctcagcatgccaacttggaggaggaccagggtgagcagcaactgaatccagagttcgcagatgcagcctgaatggcgccagtggtgggggcccggggtgctccaatggatcaccaagggaatgatgatgaagcgaatgaggacaaagccacgtggtaaaatggcttcatcaggaggagatggacacctgtgagaaatactgtgcagagttctttagcgtctctgagttcttgaaacataagaaaaattgcactgaaaatccccctgtcctctccaggaatgacagtgagaggccatgacagctctctggagccagactgagccataccagccacccagtccaagtaataaagatggccacaaggagaacagtggcagctcaggggacatgaaagagaagctgggtgtggagtctgtggtgcacttacagacagagatggccctgccacccacacctaaggacataggctatttacccacacgcaaagtagccaacgctaatgtgcccatgcaggctctctggggcaccaaggtggcagtgaatcagtggagtgcaggtgcactgccagcctgtgcccagtgcccacagcatcccatgggtcctcgagcagatcttgtatctgcaacagcagctacagcagatccagctcaccaagcagatctacattgagatgaacgtgtgggcctcccacatcctccactgtggcagggcaggggctgacaccctgaagactttgggcagccacatgtccctgcaggtttctgcagctgtggttttgcttagccagaaggctggaagccaaggtccgtctctggatgccttgaaacaagccaagatactgcacaccaacatcccttctaccttcagcactctgccccaggactgatgccttttgttctgaagccagatgggaaaagggtactctcttccctttccctgtttgggaaaacatcatgtgtcccatactgagtgctttgctccctcaggctctgggcttggtgctcttccagggtactttctccactatggcattagacccgtccaagaaagggaaaggaaggctatggaacatctccaagcacaagtgtaagtgctctagcaaggtttttgggactgatagcttctcatggatccacctctgctcccacactggagagagacccttcgtgtgctatgtctgtagtcatcacttcaccaccaagggaaacctcagggtacagtttcacaaacatctccaagagaaggtgaacccccagttgtttgctgagttccaggaaaaaatggcaacaggcaatggcaacccatatgcactctgtacctgcccccatcaatgaatcgagcctctctttaaacaacaaacttgtccttgtaacttcctctctaaggctacctcagaatctctcttcagagactaacccgaagaacctcatggatggcctgttgcccaattacctgtagcccagtccttctgcagaaagtgagggcaggcctacactccttgaggtaaggacaaacaataattcaccaagtattggtggcttctaagtgagtgggacccccggccaggaccagagaccctaaaattgctgtagctgtttgagaacatccacaatgcctccactggcttcattttctactgattcctaagctatctcaaaatgtattactgcacatgcacccacacaccagggagagactattccagtataagatttgtggctgagctttttctaccaaaggcaacttgcagactcaccttggggttcactgaaccaacacacccataaagaggcagcattcatgcctcatctgccagagttaccaatgccgtgatattgcaacagcatattcagatgcacacgggcagtcagattcccaatattcccttgccagaggatccctgtgaccttatgatcctgatccaatgatggtcagtgaggatggcagtacaagtgccatctgctatgatgatgtccccaaaagcaccgatgtagaagtcagctcccaggagggcccaagcagctcctcaaagatccccgtatctccttccatgacggcttccttagatgccccaggtagggggagtgggtcctatcccttttggcctgcagtgccagagcagccaaaaaatggttcagtggagagcaatggcttgaccaaccactcatcctcactgaaatgagactaggagtgtgagagccaaagtccagacaccatggaaactaggtccttccaggtactctctggccaatagtgaggcacaaatcatcaagtcaatgtctcctgatgctgggggcaaatcagagagctttgagaacagatgcagggatggaaggtcggagcaggctcccttcaacgtttatctgagcccagccaacctatgtcaaacttgaagttccaggtatatttgtaggaccctcaatcttgtctccagggatgacccctttgttagaggcccagctacactgacaggtcaagcaacacggctgcacccagtgtgggaagaacttcctgtccactagtcttttcagattcacagacagactcacactggagagaagccttttgtatgcaacatttgtgggacagcttttaccaccaaaggcaacttgagggtctactatatgacacatggggtgaacaataactcagcacaccatgggaggaagctggtcctggagaacaccatgtctctgttaggtacaaaaggaaaaagagtctcagaaatgtttcctaaggaaatcccagcccctttagtgaatgtggacactgttgtaaggaatcagtatacccccacacttgactgtggtctggcagtgaaaaccagtgagctctctctgatccagtgtagctgtattcctaccctcctggtttccttggaggctgtctccatcatgaataacaccaccatctccaagatgatggctaccaatcaggtgtcattgcggatgtggaaaaaccaggtgctattgacagcattcccaaacatcagttcctttacttcctggaagaaaacaaggttgcagtcttctttttttttcttttctttttctttttcttttttttttccagcttagcttaacttgcatggaaggataaatgcagacagagttaaatctctagaatctgctttttttttttttttgtaaaggcccatctcctcctgttttctttcttttttatttttatttttttcgagatggagtcttgctctggaggctggagtgcagtggcgtgatctcagctcactgcaatctccacctcccaggttcaagcaattcttctgcttcagcctcctgagtagctgggactacaggcatgtgccactgcatgcagctaatttttgtatttttagtagagacagggtttcatcatgttggccaggctgatctcgaattcctgaccttgtgatccacccacctcggcctcccaaagtgctggagttacaggtatgagccacccgcgctcggccttctttttcttactggtatgcaaatgacgtttatgaaggttgtgaccatcacctcaagcacaattgaaatgaaaatgaaaaaaatgaataaaaaattataccaaaacaaatatacactggatttttttttttaagcagcaggtgttgcaaagtagccttgttacttgtgacaaactatatacataggactttcgtaaaacctatggtgactttttctaagaccattatctacttcaaggtggaatcattggaacttattgaaccacagtggaagagacaactacttagcctaattggggtgaagggtattggtaaccgtatgcaggtaaacggacaagatctgtcatctatttagggaactgttttatattcccccaatcctgttaacatctttctttttctttctaaaaatatacttttaaaagaacaaaaaactaaggttgtacaattataaaattgcttcaaccttagaaccttaagtaggatgccctcagatggacttatgttagtgcttagggattcattgtgtgtgttgctgtttattcaaatgcagttcagtcagaaccgcaagagtgccaatgtcctcctcatacttcccaaatgcctttttcttcctgaacctgaggtggacacctgaatggggaatctcaggtgacttaatttagtttgtcggtgcctaccctattgaaaaaccgggttttcattcttgagaagaaactcatggaagggtgtgtttcctgccataggttcacacactatttttttgttttgtttaatttatttggtgcaacttaggaagattattttttcttgaggattttatgaaggctgtgaagttggaacaggtgagtcctgggtaggaaagcttttatttatctcccttatttatttatttatttgttttttagccatagtctctattttcctattttaagactactgaagtattcccaggttctgtcttaaacctaaaagtcagtgtattggtggaaagagttggatgttcaaggtgttttgtgattcctttatttgtaatctccttttgtatatgtaataatattgagcaaaggaaacatctctctaatggtttaacaagaaaggagaaagaaaaaccctaacttctgggagaagtctatcccttctatgtggaaggccctgaatgaaatgtagatcaagactgttagctaatgttttgcctcttggttattgcacctgattttaggcctttttatttttttgccatttgtgcctttccttctggaattgtaagtgaacacaataatggtatctgcttatactgtgaagtgtgtattgttacagagaccacaccagtggctttttcactgttgagctaataatgccttgtgaatgtatgatctttggagaaactcctgtagctgtgctgctaatgctgtctgtctgttggaaaataaattttgaatgttttctctttggaaaacatgtccacaaatcacaatatgtgactcttaggtgaattctgaatcagataagctgtaaaataattgaaaatgtaaacacatttaccaatttggttgtgttttaaaaaagtcaaaatttagtgatagtactaaaataagcaaaagcaaaataatatgatattttacaaatatatgaatggctttaaaaaaataaatgaatgagtaaatgtagttggggcataaataaaacaagattgaccaagaatcaatatttgatgaacatgggtgatgggtacatggggtttcattgttccatactgtatacttttctatatgtttgagaaattttctttaaaaaaattaaaaatagaaattggctagattcaaatcctgtcatctccattgcagcatgacttttgattctttaacctgttgatgtctcagtttcctcatccattaaatggtgataatagaatttacctcgcgaagtcgagttgagaattaaaattatacatatttacatacacctatatgtttaaattaaactatacatgattttatacagacagttttcgcacggtacatagcatggcatgtcgacgcagtagagactcaatctgtgacagccaatgttaatggaaagggtggaatttgttcagggcctaaatcagattttcaatcatgtgctagtttcataacaccacactgctccttgacacgtttttcaaaggaaagagccaaaactcattgataaggaaaggacatcttggcactgcttgaaaatcaccccaacaggtccctaaatccccatttgcagctccagtaaatatccccatttgcagctgctcccccaccagtacctaccctgctgctaaggcccaggccctgtcagagaagcagcacatgacggatgtttaacataaaagtgttttcagggggcaggcagggctgctttaattcccctaactaggtaatttaaggtatattttctcatatttgccaacagaccaaagaagaaatgctctaagatgtaatcaatattcacatcagccttcaaaccaatttgatttcagtctttcacactgttgaaataaacaaccctgtgaagtcccacacatcaagataaaagccaacaaagaaatggcatttttcccttgagcaactatacacctaaaagatgacttgtgaagcaataaatataggttatggagattttcccctcttactctaagagtacataaacactttaaaatgtatttgagatattattgattgctgaattaatatattttgtaagatgaggtaattattgacaaagaagatattctcatcctgtattcagtttaaatgcaagctgtcatacaaaaaagagatttaagaggagatttataacctgctccaggaagctaggagaaggtttcatccacccccaaagcgcagacacctcctcactcttctgcttgttcacagtaatatggatgccactgtgtctggtcacagatctatgtctctgcttaaattgtccccattgcacaaaatgtcctttctccatctccacagactaaacttctgtctcaacctcctatgactgtacttttggaaaggaaagtggggaacacagtaggtgagaaaagacatctgttttgctggttgataatctagaagatgtggtctagacattgaattattctcgtttcataatttataagaacaactattaaaatgcccagtggtcctggataatgtatagtcaccattcttatcttacaagacatagctgtcctgatgtaaagatacaacgtgtgtaatctttccttctctaaacttctcaatcactctttaatctttgttgctacttaccacttgatatgttgcattttgtttctgaaaattcatgtctataactataccatgatcagaatggctaaagtgaaaaagactacactaaatattgacaagaacatggagcaacagaaattcacatattcggctggaaggaatgtcaactggtacaatttcaaaaacatttggcaatatttactatagctgaacatgtgcattccctgtgatgcagaaattcaatttctacctatatgcccaataagaagttacatatattcatttgtaaaacatgtacaagaataagaacatgtattacatcagtgattataatatcctaaaactggaaagcaactcagatgcacatagcagtttcaaagataaataaagtacgataatgaaatactacccagcaatgagaatgaataaacttgccatatgctcaaggcagattgaatcacacaaatattactgagtgaaaaatgaaagcaaaagaaattcaagaaaaggcaagactaagctatgaagttgtaagtcaggagagtgaagataggggctatctttacaaggagatagtgactcagaaagagtacaagggaggcttctggatgttggcaatgctgtttctcaatttgggtgctggttacataggcgatttcactgcctatgtatgaaaattcaccaagctctacatttaagttttgtgcactattctgaatctatattatactttaaaagtttttaaaagaaaccttatccatcccattgactaaattttgagaacatacttcttattcaatccatcttcatagccccactgcccttcacattagccttcatttaaaacatgcttcataattgttttctcaataaaggactgagctacatgtttaaaaagatgctccggtcccaggtcctaggatctagtatgttatcagatggacttgaacttccctgtgtagcttgctaattactgctttgagtttagacctttggtattgatgtggtttttctctgtctccactcaaatctaatgctgaattgtaattcctagtgttggaggagaggtctggtgggaggtgattggatcatggaggtggcttctaatggtttagcaccatccacctagtgctctctcgtgatagagttctcaagagatctggttgtttgaaggtgtgtggcacctccccctttgctctctctctctctctctcctgctgggcatgtgaaagtgtacttgcttctccttcaccttctgccatgaatttcttagtttcctgaggcctcccagccatgcctccagtatagcctacagaactgtgagtctattaaacatcttttcttcataatacccaatctcaaatagttctttatagcaatgtgagaatggtctaatacaagtatgttacacatggttttctgtaacaggcttttaactggcctccctccttccagcatttcctccccataatccactcccataccctacaaatgacttattcttttaagaaacacagcatcaatcacatcagtcctctgtttaacaaccttcaatgaccatccttttcctgtaggagtaaggttaattaaaactcatggtgtagctctcgatggcctctacagtagtcatgaactttctgcttcatcagattaagtctaacttgtgaatgaggctgggaaacatttactgtcctccattaacagctctgctcatagtcctttgctcccatgattacacctgtctgaatgcttaccatcattctttctcctgatcctagagactatctcagaccattattaccttgtgaagaattttctggtcaccccagctcacagtgatctcttccttctgataaattaccccaaatttttaaaaaatatatttcaaaaaatctttttttcaaaaaatatttttgaaatgtatttttatatattttatgtatgtttttaaaatatagttcacttaattttacagtgcacttttataagcattatctcattcactgtttataataacattgtgaacaaggcaaggtacaaagaattaatctcattttgtagcttaaaaactgagattcagagaagtgaaggggcctaagccagtgtgctcagccaagggtaaagctcactcttctcacccgagctctctataccaaattaccttattatgagtatatacgttatctcctcccaaatatacatttttttctaaatgttcttacacgtttgtatgtctcataatactggacaagacatttacggggctatgtagagctgagtgattttatttcaatattgttcccagcaagctcaaggactgacaaagctgtaccacctctgctctatgggactactgtagcaaaaactgaattgtagaaaaaaacaatcactgcatctccaaaaaatctgcttttggaagtaagaaagagacaagaaaaataatcttttaaaggtcagggcagccttaattttacctttatatcctaggctccaatattgaaaagtttcaaagaaggctatcagaggtaatgacaatgggcttcaagaactacaaatgaatcacaatgaaataagtttcaaattgatcaaattccagaaaccactcctcagataatttaactagtaagcaaaatggagaactttttgattttgaagcccagtttaacagaatttaaactatattaatacaaaacttaattttctttattccaaaggctatattatactaaatctttctggaagctaaccacaggactaatgtgatgaaattgaaagaatggggaacaaactaggtggatgtctggacaccccaaactgaaggtaaatgctaccttctaccctaacattcttgacttccacaaactcaggtgttagacacctgagcactggaagttaaacaggtagatatgaagactaagaaaagaagagggagatagagggaccaaaataaatctgaatattgtaaagaaggtattcacacagtctttatttgcctagtgctaaatacatccagtgtctacttctagtctgacccttcattccaaatgcctgtgtctgggctaacgggagcatagacagcgaatagaatttgctttactgtctgatcttcactcaagtgaaagcaatttgaggcaggaatcatgttttgttttggtttatgtgtttttttgcagagctttacatgtcatgtaagtcggaatttctggaatgagtacttaagcttagggattcctgagcatgcataaacatttaagagcggctaggtgatctgtctagccagagaatcttgtcagcatgtaactgtactcaagaccacaattttactaagagttgaagtgtgtaggtaattttaactggtgagaaaattcatttaggataaatatttattatttgaagattatttttatgttcactttatttttgccatagctattgttactatactgacagcacttccaataagaacctgtgtaaaaaaaacaatatagtggtcctcagtaaaaaagtcccaatgctttaaaatggtttatgtaggcagagaactatgctttaacttcttactataatacaaccataacttgcataaagtaaatccaatcctagagcaattatgagctatgaattctgctggtcttatttcattagcacaaataattttaaaagggctagacaaacaggccaacagatgtcgagcaaacagaaactttaactgagattcctgaaatccctaataaaacaaataaacaggagacagccataataaaataaatgcctctgtaatgaagagaagtgtgtaatagtaagcatctaaacctggcattataaaagaaacaaaaagtaaaaagatggtgtttcgaaaaccaagttactaaagtaaggttacctatttatcataaggctaaaggtgtaaggctgctgtcatccaagtatgatccagggaaccctagacagaccttttagggagtctggcattccaaaactatttttataatgataataagacattatttgccttttttactttcaaagtctcgcaggtgtatatgcaaggtttccagtctacatggtatgtgataaggtcatcactctgatggttaatggaatatatctctacctctatctctatgccacataaacacaacctctttagagtcttcttggaatctctcagtgaaactataaagggatcctgagaccaacaagtttgagaactgatggtttacaggctacaaattcaatttatcacaatatgactttgaataatattttaccacttcacacacagtgtaataaatttacagcatttcacctccattctttgtgctattgttgtcaacacatttttattctacataagttaaaagccccacaatgcagttttatggtttttcctttaaaaaattatcttttaaagttttttttttagcacttcaaagtttggttctgacatacattgtttctgatgaaaagctggctgttattcttagctttgactccccatacctaaagtgtctttcctcatttttctatcctgtcaccccaactgctgttaaaattttcctttttattactggttctcagaaatttgattacaatgagccttggggtaattttctctatatttcttctctgtatctacgaaaaactttcagccattatttctttaagtatctttctttctctccctctcttcttctgaggcctcaggtacacctattttagattatttgattttgtagagttcaggagcactatttctttttttaaaatcttttttctttgcttcagtttagatcatttctactgctttttcttcaagttctctaagctttttttcctgtgatttctaatctgctgttaatcttgtccaacttatttttcattttatttaattgttttttatttctacaagttccacttggatctttttacgccttccatttttctcctccttatgtttctatatttttttacatccttgaattcatttttattgtatgtatgtagtttatatgcactgttttaaagtccttttataataatcacataatctgtgtcattttaaattctgtttctgtttatctttctcccggttatagactttattttcctggttcttcaccagcttgataattttgattgggtgctagatattatgtattttacattgttggatgcacaatttttttatattactttaaacaccattggacattgtactgattattaaataatttgcttatcattttgattttttgagacttcttttaatttttatctgaacagcctctattctgggactaattaaagtcactactaatttatcacctttctgaggattctagtgcctgccctgtgcattacaatgtctcttgaatcctggatgctagtaatacaaactatgcccagcactatgtgaactctggaaattatttggcctgttgcttctctttgcctgagtttcctctcatgtatgtacagatcagccaaagacaaagagtgacccctccagagccagagttctcttctgaatctctctctccccctctttctctttgtctctctctctttttctctctccccaaatccctcctctctggtacacttattcatacattctagatgctttaggatccccaatctcctattctattcctcaacacaacgaggcagctgtgctgtgttgtggttaatcctccctgtgctgttgcctagaaactgcctccaggaaataagtggaagaaatgttaggactcacttcatttattttcattatctctgtattatctgtagtccaaggtctgaaaatttcctttattttgtccagctttttaatttgaagatcaatttctgtagcagtgtacatttatcaaggaaacaaaagtcaaagtaatttatttgtgttgtattttacagttgtagtggtccatgataaattggtgaaaacactgattctttatcatagattatttgaaaagagccacattagataatgtttctaacatgcattatcatgtttataagatgacatgctgattgtgtcttggggacttaatagaactgattcagataaaggaataaaggagagtagagaggactttctaggcagatgttctctgtcccatgagaaccataaagacatgtgcaaggaggaggcctcagatttttctacttaaaagttgtgcctggaattatttgggattattatctgtacccaaggagaaaatgatgcgagtaataattgaacattgccccaattattgctgtgaatctataaaaaatgaatgtttagtgctttcttcttagagtcctattccattcttcttaggtatctaccttcccttcaagctattttattaaaaacagggtcaaggttctttttggtttttattttctccaagatggtggattggaggcatcgtcaacatgcttctcccacttgggaagacaaaatagtgtgtagagactcacactgtgaactttcttccaagaagcaacacaggaacttaacaagaaaatggaaagaaaccacataccctttgaatgaagcagcaagttggctgggcacagcggctcacgcctgtaatcccagcactttgggaggccgaggtgggcggatcatgagatcaagagatcgagaccatcctggccaacatggtgaaaccccatctctactaaaaatacacaaattagctgggcgttgtggtgcgtgcttgtagtcccagctactagggaggctgaggcaggagaattgcttgaacgcgggaggtggaggttgcagtgagctgagattgcgccactgcactccagcctggtgacagagcaagactccatctcaaacaaacaaacaacaacaaaaagcagcagcaggttgcagcctgcactgtgagctagttggaacactctaagtccccagagtgtgagagggttagaaactgcttctgggatatacatgcccactggggaacctggcaatccaggctacggggaaagacttaatcctaccaagccctagagctgatttagtgagccgcacggggtacatgagaaggagcagcattgggatgtgctttgcatgcattcccagtctccagtggggacagagagaagccatttctgatcctcacaggggacctcgcagacatctgccagctagctcaggtggtggttgagagaagctcccaactgagatttgcaatataatctcgagtggggataaactcctttagcccaaactcagggacaagcagaaagtgtactataaccatgagcacaggagctaaatgcccctgccttgcaggtggatcaggaggggcatggcctgaaaaccacagtttctgtctctatggggaagccttgtggcctggagaagctttgagttctgagggcagactgcttggaatctagctagctgctgatagtgaaacactgcaggtgtgagacctgccttgccaagtgtgtaggggctgagggaggcttactgctgcctgctactccccactccctatgtggaagagtccacatggggaagtgccttctgtgcaatagaggcagctgtactcctctgcttatgccagcttgtgcctccacttgtgccagcacgcagaacacggacttccctgacccagccccacctagctttgcccctccaccagctccggttgcttaacacaaaggtctgagtcttttaggagctatatcgcccttcccattgcctgagacaccaaagtacctctcccagtaacataaggcaagcacaaatcccaccattattaccacagttggtagtcctttgcaagcactatctcctggctagaggccaaccaacacagtccttcacagcatttgtagacagaataaaacagcaccaagaaagaggaaacttgagtgtgatctcaactatcaccattgcctgcagcaccctggctaaccaggaggtcctcagcatgtccacatgatcagttcgtttactagtataactggcatttgaggaagccaacacactaaagctattcataactaagcaatctctcagagtctaagtcactctcctgccactcccatcagagctagtgctggtagccacttccgggagacttgagaacaggtcacatcactagatcccttgcagacattctgcagcaacagcctggaggtatcagtcccactgggtggccagatccagaggagtagcagcattcacagcagtctggctctcagggactcctacttctaggggtaaagggggtgcactatatcaagggagcaccctgtgggacaaaagaacccagatggccggtcttgagtcccagaattttctgctttggggaagtttctttcaacagagtcacaggtgcagtgctgagctcagcagggaaagcttgtggctctaactaaacagtcagtcagccctggtgctagtgaagggtcttgaaaagtagaattctttttccccctcatccaccactgcagacacagctggaacttctcccacggaagctcagtgtgggtgcatctgtagacaacctttccagaacacttcaaggtaattgcatccccacaggaaaaatgccttccaggtttagtcttacacaagggggagagtcacaatccctgtctacatggaacatcagcactcatgcaggtgagaagaggtgcctatacgatctgtatagctggaacactgggccagcagtatgactgggaggtggatcactttcctgctggactggcagggtagctgaggaggctctctccttccccttgaagaggactcagtgcatttcactgagagttcccccagctgcttctgtcaaggctgggacctctgcccacctctaaatattgcatttacccatctgctttagccacagttgtttttttgttccccttggacatctcttactggtctgaagcctgaactgttccacccagtgaataaaatactggggaaaaaaagtaaataaataaaagggtgcacaccactggagaatgagacaagcgtcaagacgcctctgccattcaagccccacaggagacaatgaacctgctcacatactgggaacattgctactacaaccagcatccaagaaagctgtcatacaacggctttctataaccaaggagctcatacagaattcatctctgaaagcacccagagccaaaccagattataataaactataatcaaagtcacatcctcaagggggcaaaaaagaaattaaaaaacccacaagtgagtaaaaaataagttaaaaaataattagaagaaatggtctatccaaatacaagaagtgcaaagaaccactgggagattcaaccatacacacaaaaatgtgacccatggtcgaaagagaaaactgttaataaacccaaaaagagatgacccaggtgttggatttattggatgtactttaagataaatataataaaatacaaatggatctaatagaaattgtagacaatatgcatgctgagatatgtaagtttcggagagagaagaacaaacatatgtatagggaataggttaaccagtatatttaaaaatatgtatacaaaatatgctaaccaaaaagaaagattgacaaataggacacgaatacaattttaaaatggtgctcatccaacgacagtattaagaaagtcaattagcaacctaaattctgaaaaaatattcaagaagatacagctgaaaaaatattacttccagaatatatttaaaacctcccataaattaacaattaaaaattacacaataataaaatacataaatggtgtaacgagtgagtactgctatagactgaatgtttgtgtccccccaaattcatatgttgaaatctgttgtgattttaatttatgtctttttttttttgacggagtcttgctctgctgccatgctagagtgcggtgacacaatctcagctcactgcatcctctccctcccgggttcaagcaattcccctacctcagcctccaagtagttgggactacaggtgtgcgccaccatgcccagctaattttttgtattttagtagagacggtttcatcatgttggccaggatgatctcgatctcctgacctcgtggtccacctgcctcagccttccaaagtgctgggattacaggtttgagccacctcacgtggccaatttgttatgtcttcttaatttggacttgaagtctctctcctgagaatgaccataagccaagataaccactgcctaggacagccttgactaggggaaaaattaggtttaggtgtgtgggtcaggtaaaatggaatggatctttaaaacttcatgttgagcaatagaaaccaggccctcctcccaacatgctatataaggacgtgaagcgaaaaggcataaaatagaaggaatttatttctcccaggtcccagagaggttataggtgccagtgggaggctgatgggaagttcagaggcagcagggagctcaaccagtaggtgaagagagagagaaacagagggagagagaggcctgtgggattatacgtttattaaggttcatgggtattatcccttaggcttatccatgggtactgaggactgtctagttcaaagaaaacacataaaaaggggagaaattatgtacacgactctggcgttggccattagatttatcatggttagcagctgtggaaagtgttggattttgggtcagtgagatgaagaacaaccataaagggagtggaagttctaactaggccaagggagatgaagtatgacttatgtcaggcctgaaaatggacgccaagggagcaaccacattaaacaaacttatgacagaactgaattaccagtgtggtcgtatttggaggtgcggcctttaagaggtgattaggtaatgagaataatgtccatataaaagaggtcacagagagcttccttgcttttttggcaatgtgaggacaccgcaaagatgactaccaacccgaaaacacgccctcactaggcactgaatcttctgggagcttgatcttggactatacttcctccagaactttgagtttctgtttttataagccacctatctatgatattttgttacagtggcccaaatagactaagacaaatccataaaatatgttaaacatcataagtcattagggggatgcaaataaaatctacattccggtgccattcatccccactagaagcactaaaaacaagccatctgacaaccccaatattggcaaatatgtggaacaactagacagttcatgcagtgctggcgagaatgtaaaatggcaccgcacaatcactttggggtcttgcaatggcccagcaagaacactcacagatatttagcaaagataagtgaaaacataggcccataaatgatccatacaaaaaattttgtatgcacctcatttatatttgttgtaactggaaacaatttaaacgtccatcaacaggagataaaaaagaactacggactgatacacacaacaatattaacggatctctaaagccttgtgttgagcaatggaaaccaggcccttccctcaaaatactgcatgataccttttatataaaatacaagaacaaaaactaaactatggtgatacaagtaaaaatgtggtttcctctgggaaggagagtttgactaaaaaggggcacaaagggatttttctgcgatcatggaaatgctctacatattgttttaggtgatagttacacaggtgtataaaattctcaaactcattgaaatgaatacattgtatctgtgcattttattatgtcaatcatacttcaatacaaaagaaaccaaaataaaataaaataacctatatagaaagaaatgtgcccctgcacaattgtagggctaggtaagttttcacaatttggaaaagcccatgtaaccagcacccatatcaagaaaaagggcattacccacatggcaggccactcttgtacctgcttcctgtctctaccagcccaagtaaccattatcccgacatctaactgcacagactagttttgcactttaattaaatgggatcatttagtatgtactctggtttctagctaattttacacaatcataactttatgagatgtatttgtattattatgtgtagccataaatcttcattctcagaactttggggcattttattgtctttggtcatttcatttgtgtatatttagcttcccagggcaaattaatgaccagctagtctttgttgattccaagtctcagacagctatcagagtagactataatcacgacagaccacagctgctctagcaattggaaaagtatagacaaattcctgcaaaaactgtagaaagctaaaaatattaatttttctctgtgtatatattattttattttggttcttttttatgaggtataattttttctacaatgaaatgcacttacatgtttagtttaatgtgttttgagaaccatatacacccatgtaacaagataatatatagaacattccctacatccctgaagtctcctttccagtctaatttttcctcctacagacaaccactttctgataattttatcactagttaaatcatcctggacttaaaaaaaattaattttctcataagagggactttaggtcattatattatattcaattatattcactcaaagaagagagcataaacagacaattaaaagctgcagtcaactgaatcacactcacatatctgcacattgacaccacacaaatcagtcaccaactttcatgctgctgaaaggtaaaactatagagttgcccccagtgaaaaaagtctttcagccacatctgccgcagcagtgggctgacagagggatttgcaatgttccaattgctttatttatgatataagagaataagaatgcatgctctgatgagtttggctgcactcatttagactatcgggtgcaatgtttgaaagccagatttttcctagcacagacttactattgattgctattgggcacatgcaacgggacaaattttgtcaatcaagaaacttgctgtaatgccattaagcaaacaagaaactttatctaatataaattttcccagaatccaatggcttggtgcacaggaagaaagagttataatgattgagagtgaaaagttttatctccctgtctggaagaaaaatctgggaatatatttcactgtagatttcagccagagaccaaaaagcatacaccatgcaaaaagatggatgataacttgttctcagtagtcatcataacccataataaattgttatttcttatgaaacttatgagtctatctctgatgcattggctgaatgtagcaaatggttgaatcattaaaaccttcaatttaatttaactcatgtacatgtacagatataatttctgtctattaaattaaaataagaccaaataggcaggttagaatctccaactgtgtcaaaaagctatggcttaacacaggcaaactgatatcagcagatcacattttctcttctggcagaggagcaccttacagctcggcactcagaagaacttgcaacattctgctcccctgcctactgaggatagtcatagcctctttctgacaaaggatggtaaagatggccacaaatgcaggactccggcttttctcagctttaaaatctgggggcagcagcaggttgttattttctcctaaacctgatggggtttaggggaaagaggtaatggacagggagtcacagccccgtcctacattatttccttacaacctcatgggtacccccaggagaatcagcataattctctctcccttccccctctctcatctcttttctctctctttttcaggatctagctagttccagagggtaactcaagccctgaccgaaatttatttttatgctttaagttctgggttacatgtgcagaacttgcagttttgttacataggtatacacgtgccctggttgtttgctgcacccatcaacctgtcactcttctaatgttatccctcccctacccacccaaccccaacaggccccagtgtgtgatgttcccctccctgtgtccatgtgttcttatagttcaactcccacctatgagtgaggaacatgcagtgtttggttttctgatcttgtgatagtttgctgagaatgatggtttccagcttcatccatgtccctgcaaaggacattaactcatccttttttatggctgcatagcattccatggtgtataagtgccacattttttgaattcagtctatcattgatggacatttgggttggttccaagtctttgctattgtgaatagtgccacaataaacatacgtgtgcatgtgtctttatagtagcatgatttataatcctctgggtatatgcccagtaatgggattactgggccaaatggtatttctagttctagatccttgaggaatcgccacactgtcttccacaatggttgaactattttatagtcccaccaacagtgtaaaagcattcctacttttccacaacctctccagcatctgttgtttcctgactttttaatgatcaccattccaactggtgtgagatagtatctcattgtggttttgatttgcatttctctaatgaccagtgatgatgagcattttttcatatgtctgttggctgcataaatgtcttctttggagaagtgtctgttcatatcctttgcctaattatttgatggggttgtttgcttttttcttgtaaatttgtttaagttctttgtagattctggatattagccctttgtcagatggatagattgcaaaaattttctcccattccgtaggttgcctgtttactctgatgatagtttcttttgctgtgcagaagctttttagtttaattaaatcccatttgtcagttttggcttttgttgccattgcttttggtgttttagtcatgaaatctttgcccatgcctatgtcctgaatggtattgctcaggttttcttctaggatttttacggtcctaggtcttaggtttaagtctttgagccatcttgagctgatttttgtataaggtgtacggaaagggtccagtttcagttttctgcctatggctagccagttttcccaacaccatttgttaaatagggaatcgtttccccattgcttgtgtgtcttgatgggaatttctatactaccaggagaatcactataattttctcactcttcttctcctctcctctctcctctcctctcatctcctctcctctcttttctctctttttcaagatctagccaatcccagaaggtaactcaaacccaggctgcaatttctatgctgcagaaggaggctgtgaccttggattgtgtataagaagctaaaacttaattattatttactctggtacagacatccaccaagtgggagaattattttccttatagatcaggagtcttttaatgagcagaatggaacaaagggttggtattctctgaacttgcagaaaccagccagttccatcagctgtattttcacagcctcacagcttgaggttttggcaatgttctttcatcccctgagtgaaactacagtgaaatattcacctgaggggggcctaaaaaattcatatctcaatgtcccccgatataaacacctgggcaagagtcacagtgtgaacaggaagaggcagggaggcactgtcaatggagatggagatttaggagaaacttcactctaaggaaaatgttctctctggctcagagaacatatcttaaattgtcattaatcaaaagcgtgtttatcttcagttctttatcttgaagtagattattcggcaaaagatatatatatatgtgtgtgtgtgtgtgtgtgtgtgtgtatatatatatatatatatttttttttttttttttttccaagatggagtttcactcttgtcgcccaggctggagtgcaatggcactatctcggctcactgcaacctccacctcccgggttcaagcaattctcctgcttcagcctcccaagtagctgggatacaggtgcacaccaccatgcccggctaatttttgtatttttttgttaagtagaggtggggtttcaccatgttggccaggctggtctcgaactcctgacctcaggtgatctgccagcctcagcctcccaaagttctgggattacaagcgtgagccaccgtgcccagccaacaaaagattttttttagaaatttgtggtgactacattaaagtgtgaaactgactcttaaaaagttaagaaacacttggccaaatccatatgcgaattgttagatgatttgtctgtatattgccatgacttgctcttcttctttttatatttttttctttcccgttgagtgacctacttgatttacttaatttctgggtggatattccttccattacaagtcctagcctaagacttaaggaaaatgagcttgcttttctactttcctgactctggttccaaaggccgaattatttccattggaataaaaacttcttgattcttaacccttaaggagacttttagaaagtattatcctcaattgtaatattggtcttttcaaaattcacccatgagagcaaaatcaggaccctgttctgggaagaagcatgactacgtcccagggagccaggccatttggccatgaaactgtgattgtgaaaagacgtagatgaaagcatatgactttcacaaaaagtaatgacaagaagagggatttcttattcttgggacaatttggagagaattagtcttttcttcaggaaacatgtgcctaaatatcagaaaagaagtcatagaagaagaaagaaaatctcgttttcatttcattttgatgacttaaagatggatgggcaattttcctggggaatattaaggtttaaaagaacataaattttaggaaaagtttccagttattctcaataataagacagatataaaactattttccaaatctataatacaaaattgccctgtgataaatgacaggaaatttccgaaggtgatgggttgaaaacggtgtgatgtggtccctatatttctaaattaaattttcaggtagaataatcatagtgagataaaaaggaaatttttcagcctcaaaatataaaaggttttaaagtcatctattaaaagtctttgatatacattttggttattcaaagcagaataaccactgtacaattccatttatataacattcatgaaataacaaaattgtagggattaataacagattagtgattgttaggggttatgactggggagaaggaatagctgtggctattaagataaaaataatgaactattcctcctatccaaaaaatctatttataaataaacatcataaaaaataaactcaaagtgaatcatgaaattaaatgtaaaatgtaaaactgtgaaacttttggaaaaaataaagaaaatcttcaagatgcagagccaagcgaagagttcttaggtttgacaccaaaagcacaatacacacacacatatacacacacaaattggatttcatcaaaatttaaaacttttgctctgtaaaagatcctgttaagaagatcaaatgataaactacagactgggagtaaatatttaaaaaccaggtatctgacacagagttgtagctagaatatataaagaattcccaaaatgaaacagtaaaaaaaaaaaaagttagaaaatgagcaaaaagcattaaacagatttcactttgaggatatacatattgcaaataagcatatgagaagatgatcaacattatcagctatcagtgaaatgcaaattaaaaccacgatgagatattattatatacctatcagaatggctgaaataaaaaataaagataacatcaaatgctgttgaaaatttagggaaactggatcactagtatgttgttggtagggatataaaatgatacaggcactccggaaaatagtttagcaatttcttataaaattatgcatgccttaccccatgacccagcaattacactctttgggacttatcctagagaaacaaaagcttatattcacaccaaaacctgtacatgaatattaatagcagctttattcatcacagcccaaatctggaaacaacccagatgtcttccagtgggtgaatggttaagcaaacagtggcacattcataacatagtctattatatagcaatacagaggaacaaaagcatttatacacataataacttgcatagatatcatgcttttatccctcatgcagagtgagaaaagccaattttaaaaggttactactgtacaattccatttatatgacattattgcaataacaaaatagtaggagtaagtaacagattagtgattgtcagggattaatgatgtggggaggggatgggtgtggctgtgtgaaggagtagcatgaggaaagctgtgattgtgaaaccattgtgagtcttgattgtggcaatggttacatgaatctatacatacgataaaattgcatagaaccatacacatacaaattagtgcatgtacaacttcagaaacctaaataagctctacagattataccaatgtgaatgtcttggtttagaaactgttctatagctacacaagttgttatcattggggatgctaagtgaagaatacgtgagacctctatatacattttttgaaattataatactataattatttcaaataaaaaataaaaatatttttaaaaattaaacaaaactttgcataaaactcacaattctaaatcaccttctgtggctctgttacccatctatcacacattcagcctaggttctcttagttcctgcactaataaatataaatataaattgtccctgcattataaataaccctgccccaatcttgcgtttatctttcgtctttttcgccttttttcttaggtacatatattcagaaacagagaaaaactgcctattgaaaatgatttgtaagagtcagagtttgctaatgtgggtaaaataaatcaaatcagtcaatgataaattatatgcaagctagtgtaatgatttgtagataactgagaaattatcttattctcaaaaaaagtcaatgaacaacgtgtttatactgttagtacagtatatgctcggtaacttttttttctgctgaatggaagaagggttggaggagcatcaaagttaatggggactaggagcagactcctattggcacaaatccaaagagaattcgtataagtgatagataattcaacgagatgagcacatatttaatggcaaaatttacctacaaaattattggcatatgataaacacatctcaattataaagtccagtggtgtgtcatagaatcaaactaattaggcaatactagttttgccatgatatcttagcctagtattgctaatttcaatgttcttggaaaaacagtttaggagttatgtcagaatattattgaggttaattttcattaggtacctactcttttaattcagcaactcttatttttatagtagtgggtattgtctaaattatgattaccttgaaatttttatacatttatttgaaactagacatgctcactcaaaaatttcaatgaagactaaacatgtagaaaacgagaaacagtcttaaaacagaagggcaatagggtggagacaagttcgatcatacattaaataatattattaagctgaaataattaaaaatagttggcaatagtgaaagtataactagatagattgatagaagacagaaacaaattacatagagaaaattactgtactgcaaagatattactaatcagggagaaaataatagatttttgagcacataatgttgagtcaattgtctagccacttgaaaaaaattaaccccttaccttattccttagatcaaaataactccaaatgataggcttaaaagattaaatataaaacataccagaaattttcaggatttaaaaaagtaagcttagagtgggtcaggttttctaagcaagaccaaaatttcaggagacattataaagatgaatgcatttgaatataccataaggaagagatatatgaaagcaaatatttctacgtggcaaaaatacaataaaacagcaaaaactaaacgccaaaatggaataaaaagcttcaaaatataaagtcacataaaacgtgactttaatatataaagagctttagtaaaccaacaaaaaattaactctccaaaagaaaattgtgctaatactataatagctaatgttacttatttgttatgtggtagccactattttaatttttatctaggtagtgtgtaatctacctatctacctatgtatctatcattatcaatcaatatatatctgtgggtttcaatacatatttcaagtgattctcacagtaattctttaaggtttgtactgttctttctccaccatccaatgataaaactaagctcaaagataaaactaagtcacagaaaatctctgagcaattttttcatagaaaataaatcatagagctagagtttgatcactggtattctgtctccaaaatgaacacttaaacataattttcaatagactattcaaagagagacatacaaatggattttaaaattattttttcaacccaggcttcagtaataatagagaaaattttgaaatggtattctgaattagcatttttcacctattaacttcagaaagataaaaatgtttaataatacattgtgttggcaaggaagtgaagcaatatttattaaatgaaaaatgcatgggttctctgttatcatttacatatttccaataatttttataaatatatttgtccatgttggcaaacatctttttatggggataaccatttcagcataatctttggtagtaaaagactggaaatgaaaatacaaaaatgcaaaactgtttaaatataatatagtacagccaaacaatggaatactacgtggccattttgcatggacaaaaaacaaggcacagaatgatatgtatgtttgtctgaaaataatgagtatgtacgtgtatgagagtgtttgaaagaacagatgcatagatgcctctataatgagaactgtgatactgaaggacagatgaggaggaaagacttacttttgctgtgtattatttatattgtgtaaaatatttataatttgcatggaataatctccctcgccacacacacacacacacacacacacacacacacacacacacacacacagtgactttcaggtctctctgaggtccagaaatggagacctcttttttctctctgctatgctttttcaaaacttccttccttctaatatctaccaattttgtgaccctgaattttggtcacagttggtctcaatcctgtagtcacacagaaaattatttgaagacatggatttcttaatttatgttccaaattctctgcacattgcatcagagaggtttctagacacatccacaagctatttgatcccctcaactccatcttttattttcagagctctagtctttttaaggtttcacctgctgaggttttgaggttttaaggttttaaggtttcacctgctgaggttcttgtgcattctagtgaaaaatatattttagtgagaaatataattacagctaccagtcggattcaactcctttgtaacttctggttgcagcttagctttaaaaaccattcaaaaaacaatctagagaattaagagtccaagtaaaataaggcttttctcattgccactttaaacctcatatgcactatgcccaccaaatatgaagaatatttttctttgtaggtggcataaagtgggtactgtgggacagtactgtggccacgaggtggcagtggttcaatttactctcattctacaactgcctttaatttcaaaagcatgaaaattactagaggacttgcatttgattggttgagcagccaacagaaaggctctttcctgcattacagaatatgaactaagatacagaagtggcgcctctgagaaaagaaggttggaattatcgtaatttgtttctaggctgagataccagcatggagaaaatgttggagtgtgcattcatagtcttgtggcttcagcttggctgtaagttggaggttaagaaatgagaaccattcgtgcaaagctgaggaagagagatgaagatttaatctcagctcattcagttttcctgttggaatttttcaaagctgctaaactaaaagctttgtataatttctgattttgttttcctgaacagggttgagtggagaagaccaggtgacgcagagtcccgaggccctgagactccaggagggagagagtagcagtcttaactgcagttacacagtcagcggtttaagagggctgttctggtataggcaagatcctgggaaaggccctgaattcctcttcaccctgtattcagctggggaagaaaaggagaaagaaaggctaaaagccacattaacaaagaaggaaagctttctgcacatcacagcccctaaacctgaagactcagccacttatctctgtgctgtgcaggcacagcgttccccaggcacctgcaacttgtatcaaaaccctgcagctgaggatctgaaatgatggcagaggtatctctgctgttcttcctcttgaaggagtatttatttaatgcccaggacctttttccaaatggtcctttggagaatgaagtcatgagacaaagccagagggcagggactactgttcattctgtccaggcatcctagacagtcccttgtgcatgttcatgggtcagtctactcttaataacatcccagaacttccctcacataaattcagaagggccagatgtaatatgaagagtcctggtttccagttgcggactacttggaaaaagactgcacaggtgcatacactccctgccgaaaaaaaaaaaatgtgtgtatgtgtctgtgttgtctcacaataatctggtcacgttaatataagtaaatctttttcattttaatatagtcttcttgaaacccacatctccaccagccacatctctatatttctcatcccttcatcatcaaattacttgaaagaattgtctggactcattctcttaatttccattcttcagtctcattcaaacctggcccctgttagcattactccaagggaagttctcactttaacaccagtggttttggtattgataaggctatcagatatttttcagtactcatcttgtctaagatttgcagcagtctttcctcccttctcattaaaataaatgttactttaatcaaaataatactcacatatatttacaaaactcaacagcactgtctcacaccccagtcatgtctctccattctcaggtgatggtactcacatttatctgaacatttaaagatgctgtttcttcgctttcttctctttctttttgaaattgaggtacaacacataataaggtgaataaaactttagcttacagctcaatagaattttacacttctttgtatctgggtaacaccatccagacctacatattgaaattttccattactccagaagatttccacatgccccttccaattcaacggcccttccccaactctccacctggagtaaccatgattctgcctttcatcacttggtcttacactttgtgtgactggaattatattgtgcagcctatattctactgtctcaatttcttctctcaatatcatatctttgaaattcattaatgtttctgtatgcatgttattttaaaatttatatgtaaaattcccctgtataaatatgtaataatttatttttccattcttcttgaaatagacttttgggttttttagactgtttacagttttgtgccattatggaaaaggttgctataaacatttacttaaattttatttggtggacatataaactcactattcttgggtaattccactggaatggacttgaatggacttaactaggccataaaataggcatgtatttagctttagtggttattatcaaatgtatttcgaaaggctaccaagttgtatgctcttatgaacaatgtatgggagttttagttattccatgtcttcaccaaaaaatggtatcaggtttctttttgtttgttttttaatttaagccattatggtgacatgcagtggtatctcataaaattgtggttttaatttgcttttcctgaagaataatgatcctgagcaccttttcatatgctcattgtccatctggatattcctttctgtctagtacctgttcaagtcgtttgcttatttgtttattgttcatatgtaggcattcttcatagattctggctataagcccctgtcaaaaccatctattgtgaattctccactaatccattacttgactcttcactttcataatgattttctttgagatacagaaattcctagttttggtaaagtccaaataactatttatttttctttattggttagtagtttttgtgccctattgagaaatctttgcctacctcaagtaacagacacactttttttcatgtaggtccatttgccacctcaaatcaattttcgtgatgctatgcaaaaggtgtccaggttcctattgccccatgaccatttaatgaaaagatcttcctttcccccactgaattgcagtggtgtttgggtcacaaatcaggtgatcctacgtgtatagctctatttctgcactctattttgtttcttctgttagttcagcctcccagctatctcataatgtgcttattaatatagctttagaatagaatttgaaactcatcagtgtttttcttcatctgtgttcttccccttattattttatccattctatgtcctttctgaatccatacaaattttagaactagtttctaaattctaaatcattttcacatctacaaaattgcccttgcagttttgattggtattgcattaagcttatagataactttgaggagaattgctacctcaaaaatattgagtcattgtgtcaaaaatatagactatctacctgctaaggtcatctaatgtcttaagcaatgattttagttctcaatgtagtgatttgcacatcctgtatcagatttacttccatgtatagacatttcatgcagatttaaaaattttattttctaattgttgctagtgtatagaaatacaattgggtttttacatattgaccttatattcattgaacttgctacacttactaattttaatcatttggtcatacattattttggattttctaagtccacaatcatgccatctgcaaatgaagaaaaatttgtttcttgcattataatctttgtatcttatttattttcctttccttccttattggccagacttagtggaagagttggccactctatttagatctgcttatcatcccagggaggcagggacttaaaaatgtaaaagatataaagtgagcgagtggtttatggagttctagctattgagtcaaagtaatgactaatgccctacttataaatagactctaaacaacagcatcggctctttccacctccgctttgtgtagaagaaatgcagggggcctagaaaaaagggagcagaagtagaagcttcctgatttaggaagagaggcacaagtgttattttacccacgtcatctggttttgttgtatttaaccctttgggtttacagccttacagtttgcccaatgtgttcaggtgaagcgatacaaaaatcaccgaaggattcctgctttacctggtaccaattttgtcattctcatcatcatctttatcgtcacaaaaactatgaagtaatattaacccatttctcagattgggaaactgaggcttacataagttttgagatgaaagcatttctgagataaagtaaatgctgcaggtaccataaaataagatgaagaaaaacatataaaacttcagagttaaccaactagacagcacttctctaattttactgtacatttaagaatcacatgaagagtttattttaaaaatgctttatttccatagattctgattctataggtctgatacggggtcaggagtctgctttttttagtgagttgtctaatgattttgatcattagatctggagatcttactttgaaaaacactgcaactgggagagtactgcatttcaggaggatggatgatatagacatgcaggagattttgtgttaacttagataacagggcttagggaaccaggaaacacacctgggaatgccttaatgtgggttatgcctattctgattaaactatatcctatcataattagtagaagatactttgttttgatgataaagaagggaatgatttttgtttcaacaacagaaatttatttatgatttgaaaagcagcagagagattaggggatagacaaggccttttagttggcagactttccaagaagaaaataggctaaaacaatatatgagattctccactatgaattaaactttttcattctttattgtcaattaaaaaataaaacttctatatattttaaaggccataaaccaattatcttagtgtttccttcaatgttctaaaatttagacaggttttatctaattattttatttactctttttactctgcctggattctttacaacattttaactttctattaaagaaagttggttccaatactgttaaggctctgtttattacataatatagcacaatagtgctctaaactccacctttaacatgctcatataattccagtatagaccatgctaatactcataattgtttaatgaccatggttaatcttctgctgcatcctcatagccaggctttccttttcctgaatccatgatgagtttggttggtgtgaagactgtaattgactttggtccccaaagctcacctaatattatattcctaatattattggaatacaaatatgtctatttacatttatatatttataatctatatgttacacattacacatttatatttatttatatgttatatgacaactaattattggaatatatttttattttgtcttttggagaatttgttatggaatcaaacagacttatttttcccatgagatcaataggatatattgtgggacattttctgttacgaatttggcaaataggacccaaagctaggaaccaagattcattaggcatccaccatttttcattaagaatggctcacattttaagcacagctgcacttctcaaaaaatttttttaaataaaaaaattaaaaaaagaatggcccacagttggacattctctgtagaggtaagaagcagcaactgaacaggctctgcaacctccaattctcacctcttagctggtgtgaggaggtagcgagggatgggaggagtcaagaagagaatatcatcagagtattccccctttcccacaagccacttgaggggtcagtactccaaaataattacttccaaagacagagatctgctgcataaaaaggaacattgtgtgacattttcatctttgttctgaagcagattttaatctatgtttacatctacttaagaagaagacgaggaaactggagagagatggtggagtggagagggggcagccatggcctgcctgggtttctgcactgggcatggtgaggaggcacgtgtattctgtgggcaggtgctgcctctgaggtgccagggctgagctgtcccgccagagcttcacccggaggagaaagtaaggggctgtggagggttctcctgagggaggggctgacaggaaggggagacacctcccttgaggagcccctgaggtcccctgggtgctctctcatagggacactcaccatacacagccatcagtggtcggccagggaagcaacaacactagaggtgcacagtggttaagtaagaacagttttgttgtttcttccccttaatctttttctttcaccttaatcccgggaagttaaaatcaaagaaaaaggaggaaagaagagaacaaagtaggccatgtccacctcactgtagctcgggatcaggcctgaagtttggagagcagaggaaaggtgaagactggagtgttaaacagaactgccctgaggtttatttaaccactgaaagtgcccagaggtttggagctttctttcctagacctcttcaagggcataaggaccagggcccctctgaaggacccaaccatgcttaagcctctttgatgctcttttctttggcatcctttcctctccctatcgctccacccagaaaatgtttatatagactctggtaggcagacttgcattatatctttgtatcatttcctataagtcagtttatgctggattccttaatttgcctataaagctgaaagttttgaaataagatggtaggaaagacttctttatttttggtttccagctatgcctcctttcctgaaagtgataagcagaaaatcacccaactgcctcaatggaggaaaaattatgaggttaattaaaaataataatataaaaaggcaaccactgttaatattgaaaaatggcttgtcacacatggtgatcattctgaaaccacaaatgaccaaaactggtgaagtcctttctgtaacatcacaggcacgtctaagtgattcttttccatatctgtaaagtaactttacgaaagcaggtgaagacctgcccaggacctgaatgaaagcattcatgtatttagtcacaagagggggctgctgtgtctgtcaataagatgcctgttcagttggggaaagagtgtttggctcacagtcagtagtgaagccatgcagaaactgtgacaaatgatacgctttattctctttgttctaagcagagtagtctgtgcatagcttccaacattcaataactcctggccttgcctcaatccattatgaaaagttttgtttctactcaaaataggacaatatagaaagacagagacaggaagtagttatacagctttcaagttgaattgatcttttttttgtcgtttttgaaatagagaaaagtagatatttttggtggggaagatacttttttttctcaatctatttcatttctcttaaacttgagaagataatgagaaaaagtcttctaggttgctcccttccttcttacagtcccctcctttcttctgtctttcctcttctctgcatttcaattcttagtgtgtgtcaccactaggcacacacatggagaatggggaaaggtgggtcagggatagggtttctggggtgtaaggatgtgtgtgaccccaagtctcttgtttcctttgtaccaagatatgcagtctgtaaatgctctcctagagatagatgatatctagaggcatttcaggcatctggagacatggcttcctgatcaggttctgattatacttttctggtcactttggacacattactgtctgcgtctgagcctcatttcctctttattgttatttagatgggctttctccatcttcttatgatggtataagccttggtagggttttcctgaatataaagaaacttgtgacagagtggactgtactcctgggtaagagtttcaggcctaagaaaagatggtgttctaaaccaagaaatcagaagaggaacctgctgcctgcactgtcttactctccttcacccaagatgctaagggcaaccaatcaaataacagctgttaactttttgaggaggtcacatcctcagtgtgaggggctacatcatacccagtatattagtttgtgccataggctggggacttaaaaatcagaaatttattgtctcatggtctggaggcaatgtctgaagtcaagatgccaacagaatccaggaaaggaggatctgtttcaggcttctctcttcggcttatagatggccatcatatccctgtgtcttcatatcatcttccgtctgtgtatatctgtgtccaaatttctccttttatattgcattagatcccacctcattttacttagatacctctataatcaagaaataatcttgaacccaactccaaataaggtcacattctgaagtacttggcgctaggagttcaacatataaattttagagggacaaattttagcctataaccctcagtgaaagctcacagaagagttttctttgctgtagaatttcctgttttattgagcccaagggaaaatgacagacagatccagggagtcctgcctcttaactagtgagtctacatgaccccagccgtatttggctctttctaggggaagggagtcatacataaaattacttatcagtactataccaggggtcttcaacaagttcatgaaaaatgcatattacaaaaaaattatgcataatttttaaatttttgcatcaaaataaactcctactaacttgtaatgacattgtacacagtatctaatttgaggcactaagaaggatgaaagacaaaacagtgtgaaaagagctcctatcagagcaacgtgaattctgccaatattgaagcaaaaacaagcatcaaatttaaggtaaagcttgggtggaagaatggtgaaatcattgacaagtttatgggggcaattccccaaagaaattagcagtttacaaatgaataactcattttaagaagagacaagatgatgttgaaaatgaagcatgcagcagcagagcatacacattgattgagaggaaaaaattcatcttattcatgccctgattgaagaggactaatgattagcagcagaaaaaatagccaacaccatagacacctcaactggttcagcttacataattctgacttgaaaattaaagttgagcaaacctcccactcagtgggtgccaaaattgttgcacccatatcagctgcagagaaaagcagacatttcaatggaattttaaacaagtgggatcaagatcctaaagcattttttcaaaggattttaacagaaaatgaacacagattcaccagtacaatactgaatacaaagtactgtcaaagcaatgactgccaagaggtggaagtggtccagtcaaagcaaaagtggactggtcaagagcaaaggctgtagcaacaggtttttttgtttgtttgtttgttttttgttttgctcaaggcttgttgcttgttgactttctggagagctgaagaatgacaacatctacttattactagagtgttttgagaaagttagccaaggctttagcagaaaaatgcccagaaaaagctcaccagagagttcttcaccacgacaatgttcctgctcattctttgtgagagtttcaatgggaaatcattaggcctccatctcacaatactgactttctttcttctgacttatttttgtttcctaatcttaaaaaaaatctttaatgggcacttactttttcttcaattaatatataaacaaacctgcattgacatggttaaattcctggactctcagttcttagggatggactaaatggctgatatcatcacttaaaaaagtgtcttgaatttgttggagcttatgttgagaaataaagtttatattttttaattgttaccttttaattccatatttctataaactttttgaaacccccttataccttgatctgaaaaatctgccttgatttgagggtctggggataatctcgtttttctcctcagggattatgtgtaatgttaaagccacaaaagtagggcagtgctgaaacaagaagtgaatataccctgttcccactctaccactggaggaaatgaggacacaatctggtatcaacagtttgataaccatggctcacagtatctgattggaggtttaaagaacgaggtgaccagtcaaatggcttcactgcctgtattagtctgttctttcattgctataaagaaatacttgagactgggtaatttgcaaaggaaagaggtttcattggctgttcaggttccgaaggttgtacaggaagcgtgttgttggtatctgtttggcttctggggaggcctcaggaaactctcaatcatggcagaaggtgaaggcagagccagcacttcacatggttggagtaggaggaagagagagaggacggggaaagtgccacacacttttaaatgaccagatctcaaaagaatgcactcaccatcacaagaacagcaccaaagggaaaatttacccccatgatccaaacacctcccaccaggtctgacctccaacattggggattacaatttgaaatgagatttgggtggggacacagatccaaaccatatcactgcccattcctgtggacaataaggctagtaccctggtcctgcaccagataaccctcaaaggcaccaccatgtgttactacactgtgggcagattggaccacatctgtctcccaggtgaagaggggagataaaatccatttaaagagggcattgcccaagaaaatgtgagattaatggaagaaggtagaaaatgaaatgagaagaaggaaaggggaaaaataaggaaaggtacatgaaatcaagaactgcaccagtaaagaaaaaacaaggagagagaagatcctggatattgctctttctccaatctaacattttcattcttggtaaaggtccggtgtcaagttcataaattgagcattatttttctgagaaatatctgggctctctcgattttttcaactatagcacatgcattgaaaagtaaatgaattttgaaaatttgctaacatgaaatcattatatcaatatttttatttcaacatttccctagttttctatgtacctgtattccatttttatgactaatcactttgtaaattaatgtgtaattgtttaagtatctacgcaatatagaataaaaagtgatacttcattgattttcttctgacaagttcctaatcactgttgggtttcatcacacttccactgtttctatacatttaaatacaaactcacagtaaacatacttttaaaaatcgtaaataggatcacactatatataaaatgctgtggttcaattgaataagagacagaagcttttgcaactcagaaagtttaacccaccttatacttttttgcaagtgtagtaagtaactcacaatacagagctaccataatgtattgactatctatattgaaagaatatttaaatttttttccacttttttaaccattgcatgcaatgtacagtgctgtaagtgtatttataagagtatttcttaagaaaaattcctggccaaatggaaattttgcattcagtaatatgtaaataacatatgtagacatttattaattatatttcagctatcagaatatcagagtatccatttcctgacattatcaacaaaactgaatattaatagtatgattctgaactccttttgcaatatgacaagtaagagatgatagaaagggccttttcacaaaaatgcaagttacgggaaaccagtccttaagcactgaagtggcaagaagagacagcagtcagaggaatctggagaaagttgctgtaacagtatggaaaacatttatatattttttcttttctaacataagcatttaagaatatatatttctctctatgcactgatttggctgcattctacaaatctcatattcaaacatttttgtttctttaggagaaggaggaggaggtgaaagtggaggagaaagaagcatttctctagcagtactgtgcttggttctgaagtggcagtgttttcatttctttcattccatttccacctcccacattttgcagatctgtgtgtgtgtgtgagagagagagagagagaggagagagagaggagagagagagagagagagagagagagagagagagagagagagagagagagagacttgtctcagattggctgggccaactctgtgtttcctgtagaaatgtttgaacatatgagagagcaaagcagagtgtttatcttgtgagccattctccatatttcagatataagatttcagttctcagtgagtctaagtgacagaaggaatggagaccctcttgggcctgcttatcctttggctgcagctgcaatgtgagttagagggaaatggaaatgagcaaagagcaggctgactccaggacgtttctcccaggaaagagggagaaagaaagggagttgttatgcctgtatggtttactgggaatttctgtggaaattgaaaaaataaatttaaaggtaatttctaaggaatcattagccactaaccagtctattgctctttttctgaacaggggtgagcagcaaacaggaggtgacgcagattcctgcagctctgagtgtcccagaaggagaaaacttggttctcaactgcagtttcactgatagcgctatttacaacctccagtggtttaggcaggaccctgggaaaggtctcacatctctgttgcttattcagtcaagtcagagagagcaaacaagtggaagacttaatgcctcgctggataaatcatcaggacgtagtactttatacattgcagcttctcagcctggtgactcagccacctacctctgtgctgtgaggcacagtgcacaacaggcacctgcaaccaatacccaaactctatagctggggctctaactgcatgttttatcttgagactgagcaatgtttttgcattaagaggacttctaaattgacactgtctccacacagaagcaatcaaatacacaaaacttgatgtaataatctgaaattaaactatgaattctctgatctttagatttttatcaattttaatataaataatagttttatttcaattaatttacatgccatgaagttcagtcttttaaagtgaacaattaagtgttatttagtgtattcacaatgttgtgcagcttttatctctgtgtagtttcaaaaactttttaacatctcaaaaggaaaccacatgtccattaagcagttaccttgcccaccctcctcccagcctctggcagccaccaacctgttttcagtctctatggattttcctattctgtacatttcatataaatggaataatatagtaggtagtggcctttgtgtatggcttctctcacatggcataattttctgaggtttattcaatgtaggaaggaccagagaaagctaaatatgcacatctaaccaatgacatgcttatatcttccccatgcaagagcctccaaccagggcatacctgaagctttgttagttttcttccactctaaagcttccctactcctctgcctatctttaagtctctgccaaacacaagggacggtagctgattcctttggtataccaagctctgaataaattgcctttgcttttttcatttaggtggtcttcacttatatccacagaactattgtaaagacactgagtttttcttccctgccaagttctcacttcaccataagagtcactttgcacatgaaaaattaatgaatcaccataagaaatgttaaagctggagggcagcttgtcctccattcagataggtcattgaagcctacatcaatcagatagtacttcttagataagtcagagagatgcattgatgtaaagcccagttctcaatatttatgtgtcaaactctgtcctcaataaaagctcgaaactccaaacagatatcttggccttcctggaagattttcttatcaacaagtccttgttctcatttatttcttttactaaatattcaggctccatattgtgtgatgaggagtttgcattcacaacctctgccatatctgggctacaaagctgctttctttcttgacattacaaaccaactcgtgggtaagtaatacattcagatatatgagctataaaggagcttaaatagtgggggacttcaccaccccactgactatgttaggaagatcatcagggcagaaaactaacaaagaaattctggacttagggccgagcgtggtggctcaagcctgtaatctcagcactttgggaggccaaggcgggcggatcatgagatcaggagattgagaccatccttgcaaacatggtgaaaccctgtctctactaaaatacaaaaaaattagccaggcgtggtggtgtgtgcccgtagtcccagctacctgggaggctgaggcaggggaatcacttgaacttgggagacagagattgcagtgagcggagattgcagtgagccgagattgcgccactgcactccatcttggtgacagagttagactccatctcaaaaaaaaaaaaagaaaaaaagaaattctgcacttaaacttgaccaattggatctgacagaattttatagaatacttcagtcatcaaccacaggatatatattcttctcattggccataaagcaagcctcaataaatttttttaaaaattgaaattataccaaccatactcttagacaacagtgaaataaaaatggaaatcaatactaaggagatctctcaaaatcacataattacatggaaattaaaccacttgctcatggatgattttagataaaccatgaaattaaagcagacatcaaaaaattatttaaaataaatgaaaacagagacaccacatacaaaaatctctgggatgcagcaaaatcagtgataagaggaaagtttatagtgctaaatgccaacgtcagaaaataagaacgatcttaaattaataatctaacatcatatgtagagaaacaaggaaaaggacaaactaactccaaagctagtaaaagaaaagaaataactaaaatcagagcagaactaaatcaagacacaaaaatccatacaaagcataaataaaaccaaaagttggttctttgaaaaaaaataataaacaagatgtatagactgctagctaaattaactttgaaaaaaataataaacaagatgtatagactgctagctaaattaacaaagaaaaaaagagaagttccagataagcacaatgaaaaatgacaaaggcagcattacaaatgataccacagaaataaaaagatcctcagaaactattataaacacttctatgcacataaactagaaaatctagagaaagtggttgaattcctggaagcacacaatcttccaagattcaatcaaggaaaaaaattaaatcagtcattaagaatctagcaaccaaaaaaacctcctgggccagaaggattcacggccaaattgtaccacatggacaaagaagagcttgtaccaatcctgctgaaattattccaaaatattgaggaggacggacaccttcctaactcatgctataaagccagcctcaccctgaaacaaaaacatggtaaagacacaaagaaaaaagaaaactacaggccaatattcctcatgaatctagatgtgaaaattctcaacaaaatactagcaaaccgaaaccagtactacttcaaaaagttaattcaccagaatcaaataggtttcattcttgggatgcaagttttgttcaatatatgcaaatcaataatatgattcaccacataaacataattaaaaacaaaagccataagatcatctcaatagacatggaaaaaacttttgataaaatccaacatcccttcataataaaaacctttaacaaattaggcactgaagaaacatacctcaaattaataacagccatctatgacaaacccacaggcaacatcatattgaacaggtaaaaactgaaaacattcctcttgagaactggaacaggaaaacagtgaccctcttaccactcctagtcaacatagtattggaagtcctagccacagcattcaggcaagagaaaaaataaaagactttgaagtaagaaaaaaggaagtaaaagtatctctctttactgacaatatgattctatgcctagaaaatcctaaagactctgccaaaaactctgccagaagacccctggaactgatcaatctttcacttccttggttagatggattcctgggtatttaatttttttgtggctatggtaaatggtatgagagtgaaagatctctacaaggataactacaaaacactgctgaaagaaatcagagtcaacacaaataaatgaaaagccattccatgctcatgaattgaaagaatcaatattgttaaaatggcaatactgccaaaagcagtctagagattcaaaactatccctatcaaactcccatcattatttttcacatgattagacaaaactattctaaaattcatatggaaccaaaaaagagcccaaattaccaaagcaaaaagaacaaagacagaggcatcacattactcaacttcaaattacactataatgctacagtaaccaaaatgataatggtagcagtacaaaaacagacagatagaccaacggaacagactagagaactgagaaagaaagccatacacctacaatcatctaatcctccacaaagccaaggaaaacaagcaatggggaaaggattccctattcaataaataaacagaattaaaaacaaaagatttacagtaagacctcaaactatcaaaatttcagaataaaacctaggaaatacccttcttgatatcagtcttggcaaaggatttttggcttaagttcccaaaagcaattgcaacaaaaataaaaattgacaagagggatctaaataaggagcttttgcctagcagaagaaactatcaacagagtaaacagacaacctacagaatgtgagataatatttgcacactacacatccaacaaaggtcttatatccagaatctataaggaacttaaacaagtcaataagaacaacacaaataactgcattaaaatatggacaaaggacaagaacagacacttctcaaaagaagatacagccaagtggccgacaaatgtatgaaaacaattctcatcatcgctaatcatcagaggaatgcaaatcaaaaccacgatgagataccatctcataccagtcagaatggctattattaaaaagtcaaaaaataacagatgctggctaggctatgggaaaaaaggaacacatactctgttgatggggatgtaaattagttcagccactgtgaacagtttgcagagcagtttggaaatttctcaaaaaacttaacttaaaatagatctaccactcaacccagcaatcccattactaggtatatatccaaagaaaaataaatcattataccaaaaagacacatgtactcgcatgttcattgcagtgctattcacaattgcaaggacatggaatcaacctaggtacctgtcaaatgtggattgaataaagaaaatatggcacatatacaccatggaatactatgcagcgacataaaagaatgagctcgtggcatttgcagcaacatggatgcacctagaggccaaatttctaagtgaattagtgcagaaacaggaaaaccaaataccacgttttctcacttgtaagtgggagctaagcattgggtacacaaggacacaaaactggggaacaatagatactggggtttcctgacaagggtaggactgaaaaactacctattggatactatgctcactacctgagtgacaggatcattcataccccatacctcagtgtcacgcaatatacccatgtaacagacttgcacataaaccctcaaacctaaaataaaagttgaaattgtaaaaaaattaaaaataaaattggatatagttatgaaaaagggggcttgactagtgctactttaatagctattatattccataatataaatgaacttctattgttaatgacaattaatgaactacattgcaagaataaatgtgagagttcacatttgaaagaagttgaaagaagttactttctcctgcacatggggtaacagcatcttaggtaggcaaacactttgctgttggcaatatggcagtgaacagttacaatttaacagggaagatgtatacacacaacaaagcaattcaaacaaatatataatttcaatgcatgataaggacaataaattttaaaaatggatatgaaagatgataaaattgtgtttactttggcacggtggggattatgctgctggtggtcagagaaggcctctctgagaaaatagttacattgagatatgtaggaaagattgcaatagcaaagttaaggttcctgctaaaaagagctgcaggcagagagaaccacttgtacgatacagtgaacttaatcaataaatcttttgtgtgtgttctgacttctccaccaagtgaccgtttgcccctctctttctctctctgcaggcctttctatcccctaagacataacaatattgaaaattggctaacagtgacttctaactgttcaagggaaaggaagagtcgcatatttctcacattatttatttttctttttgtggagatggggtctcactatgttgcccaggctggtctcaaactcctgggctcaagcaattctcctgcctttgcctcccaaacagctgggattataggtatgaaccaccacgatgggactctcattttaagtcaaaagctagaaatgattaagcttagtgagaaaagcatgtcaaaagcccaatcaataagctgacagatagacctcttgaactaaacagccaagttgtgaatgcaaaggaaaatttattgaagaaaattaaaagtgctactccagttaaacacataaatgataagaaagtaaaacagccttactgctgatatggcgaaagttttagtgttctggataaaatatcaaaccagttacaatattcccttaagccaaagcctaacgcacagcaaggccctaactctcttcaattctgtgaagcctgatagaggtgaggaagctgccaaaggaaagtttgaagctacaagaggttgtttcctgaggtttaagaaatgaagtcatcatcatgacataaaagtgcaaggcgaagcaggaagtgctgatgtagaagctgcagcgagtttccagaagatctaactaagaccactgatgaaggtggctacactaaacaacagattttcattgtagacaaaacagctttctattggaagaagatgccacgtaggactttcatagctagagagaggaagtcaatgcctgacttcaaaacttcaaaggacaggctgattctcttgttaggtgctaatgcagctgatgactttaagttaaagccaatgctcatttaccattctgaaaattctagggcccttaagaattatgctaagtgtactctgcctgtgctctataaatggaacaacaaaacctggatgacagcacatctgtttatagcatgttttactgaatattttaagcccaatgttgagatctactgctcaggaaaaaaaaggttcctttcaaaatagtactgctgattaacaatgcacttggtcacccaagagttctgatggagatgtacaaggggattaatgttttcttgcctgtgaatgtaacatccattctgcagcccatggatcaaggaataattttggctttcaagtcttactatttaagaaatacattttacaaggccataactgccatagatagtaattcctctgatggtctcagcaaagtaaattgaaaatcttctacatgataccattaagaacatttgtaactcatggaagtaggtcaaaatatcaagattaacaagattttggaagaaagtgattccaacactcgatgactttgaaaggttcaagacttcagtggagtaagtaactgcaggagtaaatactttagtggaataagtaactgagataattttgaaatgatattgatggttcttgtatattttaactatctaggacactgctgtagaaagcttttaagaatgggagggaaatcatgggtttggcatggttaagttgttttctttcctggaggcagtaaacgagttgaaaggctcttgaggtgccctctggagctcagaatttttaaatgccagttttaaaaagatccaaatgattatcaaaatatagtggtagatagcaggagaactagaattagaagtggaacctgaagatgtgattgaattgcttcaatctcatgataaaactaacaaataaggagtttctttttatgggtgagcaaacaaagtagtttcttgagatggaatctattcctggtgaagatgctgtgagcatcgttaagataacaacaaaggatttagaatattttataaacttagttgataaacccatagcagggttttagaggcttgacacagattttgaaagaagttctactatgggtaaaatgccatcaaacagtattgcaggttacagagaaatctttcatgaaaggaagtattaattgacgcagcaaactgcattgttgtcctattttaagaaattgctatagtcaccccaaccttcagcaatcacatcctgatcagtcagcatccatcaacatcaaggcaagaccctccaccaacaaaaagattatgacttgctgaagaatcagatgaccgttagcattttttagtaataaagtacattttaattaatgtatgtacattgtttttcacagtgctattattgtccacttaatagactacggtgtagtgtaaacatagtttttataagcactgagaaaccaaaaagtttgcatgactcaccttattatggtggtctataatcagcaatatttcagaggtatgactgtatttgactttgccatcaactcaatgacttacactccagaaattgttattagcagaagcataccaaaggtcaggcaatgggagtggtttgtcccagttgcaggtaataacagggtgctttatagagagctttttaaaaacaatataaaaatgattaatagccaatctgatttttattaccatatgccaggaattctaaacaatgtcaatgataaaaaatattttttgacctaagttctaaacaaatgcagaggttactatttattttaataataaatgtatgcttcaaattatcacatttttatttcttatcatgtaataaacagttttctacatggaagttattttggagaattctcagttttgcagctgtcttcaacacacatggattgtaatacagcgattttccatgtaccttttatccagtttcctctaataatatattatctttgatatgttgtatatatatcaaaacaatgatataattacagccagaatatggatgtcgatatagtcaagatacagaacatttccatctctacaagcatcctcatgtttcccttttattagcaatagcaacttccattatgccaccatctactatttaacccctggcaaccactaatttgttctccatttccataattttatcaagaatgctatataaatggaatcattcaggatatttatgaacatgaatatttttcactctgcataattatctggagattcatacaggtcgttgtatatattaatgtttcattccttttcattgctgagtagaatttcatagcatggatatgccagtttgtgtaaacattcacttaatgaaggacatttgggttgtttccagttttgagctattatgattaaagcttctataagtgttcatgttcaggtttttgtatgaaggtgagtcttcgtactctggaatatataccaagtagtacaattactgagacatggagtaagtgtatgtttagttttataagaaatcgccaaagtattttctaggttgctgtactgtcttgcattcccaccagcagtgtttgagtaatctaatttctccacatttctgctagcattttgtgttgtcattggttaatacttcagcaactctaagaggtatggagaaatcattgtagttttactttgcatatttctaatagccagtgatgttaaacatttttggtttttctttcttttttaaattaactaaagcccacactttattcctatttcctttgtttttgccaaatgtcctttttatgtctgcagggtctgtaataacactccctgtttcattcctaatattagtaatttgccttttttttctttgttttactacaagtttgtcagttttacccatctttttaaaaacggctgtttaatttttgtttctgttttcagttctattgatttctgcttttatcttgattaattccttccttaaatttgctttggattaattttttccttctttttcttggttcttgaggtgggaacttagatttttgtttggatacttttttcatttttaatatttgcatttagggatatacattttctctcaatgctgctttgactatgtcctacaaattttggcatgttgtattttcatttccactcggttcagtgtatgattgatttcccttgagcttctttgatccttggattattaggatgtatgttgtttaattttcaaatatttggagatttttctgctctctttctgatatttacttatagttgtattctattgtggttataaaacatagtctttattgtttcaattcttttacatttaattttttgaggtttgtcttgtggcctaagatatggcatacttggtatacgttctacaggcatttgaaaagattgtttattctgccattggtaggtgccatgttctagaaatggctattagatcctgttggctagcagagttgttgagttcgtctatgtccttgctaattttctggcaagctcttctattagttattgagagtggggtgttgaagtttccaactataattctagaatcatcggtttcttctttcattactatgagtttttcttccatgtatttttcagctcttttggttggtgtatacacatttagcattgctattccttcttgaaagactgaccctttcaacaatatataatgttcctttctgtctcttctgtctctggtactttgctttgctcagaagtctactttacctgatatcgatataattattttgactttcctttgattaatgtttgcacgatatatattttactttctttctttctttctttttttttttttttttttgagacggagtcttgctcagtcgcccaggctggagtgcagtggcgcaatcttggctcactgcaggctccgcctcccgggttcacgccattttcctgcctcagcctcccaagtagctgggactacaggcgtccgcgaccacgcccggctaattttttgtatttttagtagagacggggtttcaccgtgttagctaggatggtctcaatctcctaacctcatgatccaccagccttggcctcccaaagtgatgggattacaggcgtgagccaccgcacctggcctatattttactttcaacatgcctatgtcattaagttagaaatgaggtcttcgtagacagctgtagttggatcatatttccactcttttcactttctctgtattttaactctcttttcattgctgtttgtagaccaatctctgtatcttaattggtatatgtacatcatttgcatttaatgtaatgtatattttagtgattaatcttccatttaattttgtttgttctgttttttgtttccctgtgttttatctcctaacttcttgtgaattatttgacattttctaaaattccattcaatttacctataatgccttggatgtgtatttttgtgtagctttcttcagtgtttgctctaatggctattataaatagataacacagttgtctattggtgatgtcattccaccaatttaaatgaagtataaaaacattgtctccctttacattcagttgtcctcaccaattcatgatacagttttctttatgttttccccaatatatatttagaacctcatcagacagtgttattatttttgcttgatccatcaaccataactgtgaattaaaaaaattgatcaaacatgtttggagtaaagacttcattatcttattttctctatataggaaatattacaaatttattgtcatatgaagtcaattaagaagtatggaaccaaaaaatataaaaacaaaaaatcttaattctggcaaggacgtggagaaaagggaactcttgtacactgttagtaggagtgtaaattagtataaccactatggagaacagtatggagtttcctcaaaaaactaaaacctgagctaccataagatccagcaattccactgctgggtatatatccagaagaaaggaaatcagtatattgaagaggtatccgcactcctgtttgttgcagcactgtttacaacagctaagatttggaagcaatctaagtgtccatcaatacatgaatgaataaataaaatgtggtacatatacacaatggagtattattcagccataaaaaacaatgagatcctgtcatttgcaagaacatagacagaattggagctcattatgttaagtgacataagccaggcacagaaagacaaacattgcatgttctcatttatttgtgggatctgaaaatcaaaacaattgaactcatggacatagagagtagaaggatggttaccagaggctgggaagagtagtgagggaatgaggggggaggtggggatggttaatgagtacaaaaatatagaaagaatgagtaagacctactatttgatagcacaacagggtgactatagtcaaaagtaatttaattgtgaattttgaaataatgtacagttaaactaagagtgtaattggattgtttgtaacacaaaggacaagtgcttaaggagatgaataccccattctccatgatgtgattatttcacattgcatgcctgtatcaaaacgactcgtgtacccctaaaatatatacaactactatgtacccacaaaaattgaaaatttaaaaataaagtattatagaagtgtgtcagataaacaaggaaatatgtaaatttctgaattctgtatttatggtattcgtgttttaaaatttatagtttgttgtgattttctgacctaaaattatttttgtacccagttttattcttatttttatgttattctttttaaaatcctccatcttgtaagtttcaggcttacaaacataaatcctcctttgtacattatcataaatctttgaaattcaacactagaagggcaggaaggatgtggaggaagttcacaaaaattgtgaatttctcttagccctctatttggcccctggagggtgttgttgcctaaattggaaatggcttttctttaaaagattagaataagctccttccttctctacaggttaaagaggtgtcctttctgactgagcattcttttagacagcgatgtataaagaatctcagacaccagaggcaggcaagtttgtcaagagagcatctcttactagcagtttctacaagatccctaagaagaagaaatctaaatccctgccatttctccttagtttcaacctggattcaagttaccccgtggtcagattgtgtctgtggggaatctcctggaaaggtgcatgctgctccctcagtgcttggctagatctcattgtgtgtcttgacgcttggggtactcctgttcccaagtgggtatcattccattttactctcttgtccacaaatggagcattgtctatttgactctgaatacggactttttgtgttagctgagttcactgacatagcattggcattgtaggaaaaaccactgcccattctgtgactcagcctgacgttcatgtcgctgtctctgaaggagcccctctggagctgaggtgtaactattattgatcttctgttccaacatatattttctgatatgtgcaatacctcagccaaggactccagcttctcctgaagtacctatcaggatatagggttctttcaggaattaacggttttgaggctgaatttaagaagaatgaaaactgcttcctcctgaggaaaccctcagcctattggaacgacacgctgagtacttctgtgctgagtcccgcattgcccaggactgtagtgggggctacataaaaactacctgagacacatagcttaaacaactaaggatctcagcctcagttattttcaggaagttgacgtgttctgtgaaagcaaacagtacaaagaaagtagaatcctgtctagcatttagttcctatggacatcttagatttctttaatttattttcttatttgccattttgcaaaggaaagagcttgtacctgattctagaagaaattagactataggatttgtaacaagcaggaggaggtgatttgcaccaaggtatttcagatagtgatggactgggatgacttaaggttggccatgtggattggtataaggcaaatcaatttgcttttagttattaatctcatctctcaaacaatcagaaacccagaatgagtgtttatttcaagctgcattatctacagattattttacccagtatcctgacttcagtgagctacagtcctttgaggaaagaagcctcttcaaaggacttcagctcactgatgaaagtatttgagactgggagacttaattaaagctgacatttaaggatgtgtgcaaggcaatctttccaaagacaatataaaagggaaaaaaaaggctttatttttttaatctggtggtccccagcgaaaggcagtctaaattaaacacaacatcatggcagagttccatgtggaatcttggggttggttgttctatggatgacctaccctttatcagttctacccagattacctctctctgtttttctccctttcaattcaatttccctaatacttgctgagtgtccaataactattgttgattccttaaccatatttaattatttctctacaccattcctcatagtgccaatagtaactatttgcaacgttcttgagcagttaatccaatgttgtgcctgcagaacttttatttctacttcagtaaaaatataggtgttcttatttttcaccccctttacctccaaatccatttccagattattattatttatggagtctggggcaaaagcaaaaacaaattattttcataacttttaaaaacagctaattttcttttaaaccattagaataatctagtaaacctaaaaagcaaaatataaataataattaacaatgaatagctttaataaaatatatttaaataaaattagaatttatttgtttttaagtttaattcgatcacagtatttaaaataaatgctagtttcaacattcatctagtatataaagaagctaatcagtgtcactctttatgcagattcaatctaggataaaatatatgcaatttaaaactaatgttgttgaatattacaaagtgttccagccatcatgagcaactatagtgaatactatgctgattcatgagtaccctgaagaaccacaaatgagtacataagagatgcaagaaaatagatcctcagcaccctcgggaaacagtatttctttttgtaagaatctattgcctccgtgctgagaggaaagatggggctagctaattaattttttccttcccttccttgaaacccctccacccttggccccaattccaaatcagagtcatatgaagtcaattaagaagtatggaaccaaaaaatataaaaacaaaaagtgttaatgctggcaaggacatggacaaaagggaacccttgtacactgttggtaggagtgtaaattagtatagccactatgaagaacagtatggaggttcttccaaaacctaaaacctgagctactataagatcatatttacttatttttctacaccattcctcacagtgccaatagtaactatttggaacgttcttgagcagttaatccaatgttgtgcctgcagaactttaatttctacttcagtgaaaatataggtgttctcatttttcatcccctttacctccaaatccatctacagataattattattattgatggagtctgggggaaaagcacaaacaaattattttcgtataaacagagtctgcctcctatggcagcagtggcacaacccacaaatatttctaatatttgaaaaggacaaaggtcaaggtatgtgaagaagtatttttctcaaatctgaaaaattgtgttagtggttttttaggttacagattgtgcccggtcctgagtgacagagacagtccgtgttcttcagtacatttgcgtgtgtgtgtgtgtctgtgtgattgagtggccctgtaaaatatgaggctctgggcagggctcttgcctgagtctaagggtcatactgtccacaaccttgctcatcttctgtccttcttgtatttaaaacaaagggtcacttttcaaagtttgccatctttgcttttgttactctccagtctcgtcacctccacagaaggcatgtagcatcacatcccccatcaagtcacatcctgtaatagaagtttgacataattgttactgtcttggtgctcatgtggtgtttaaggatgctttttaaaaatgatatcctgtaaacctttattacattcagagagatgtttgtctcctcactatatcacaagctctctgaaggaaaaaccgtatccaattcatttttttttttaatttccaaggtctcaaacactcttaaatatattgacttaactataactgaatcaaattggtgagctcatattttttcagttcatacgtatgaattaaatggatgttctaattacataaaattacatttaaagtatttatcttcataaaagccaccgtggggtctcatggccctatttatggtactctccattctgtggacacttctgttgtttcatgtcaacccacaggtacagccctaggaaaagacagctgggctgagctgtccatatatgctgaggaagatgtagtctttctcaaggtttagcacgtcaggaggcatataggcttctcttaaattgagggacggctctgaaggatctagtagtgaatagttgttgaaagatttgagaaatatattgagtataaggatgagggccagtaagagtaaagagggaagaataattatgtgcaaggacaaactaaatcattatcagcacataagaaacatatttttgctgagtattcttttcaattgtagctctgtcctctaaaacaagataaatgacatatgaatattcaagttctaggttatatttgaaatgcatatatatatacctatatttaaatttttgtctttatattattatctttatctgtatctatcagaaaatcctggatcaaacagaatcatatacagcaaaagggaaagtggagaattccaaagaagggaattcggattttaaaaaatttttatttcctaagatttcctaagaaaaaaatatgaacttttatttcacaggtccaaaattatttctaaactgttgaaagccatcttttctttagtattctcctgtccctttcatgtaactagaaccccctaccctcaaccaaaaataaataaataaatagataaataaataagtaaataaataaaagagagagagagaaaaggaagaacatggaaacagaaggtaatgataggagaaagtggaaggaaaaaaggaagacagaaaaaaaagaaaaaagatttactggactgtaagataagctataaaggaagtttgtataaaataagaattagaaaaataaaacatattgcccatccagggtaatacgtagaaaaaaatttgatttgatcttattttttctctcacaatttacagtcttactagggtcatttcttataacaatatttaccacaattcttgattatttcagaggagtcctaatccacacttttcatatattctaataataaaaattattacatatataatacataacatgtatgtccttattactttacatgactggaatgactttcacctaaattggctaataaagaccttcttgtcagaacacattcttgttttgggggtttaaaatgtggacactcattctgtgatcctctccaggctcgaattagtattacagttgaggcacgttgtcctcccgaggaggcccctccctttccttctcacaggatctttcacattctttactatatccagaactattagaaaacatccctcaggttacggaataatgacctttctttttcccttccactccacccctttccaccccggctctcagccaggtttaagtcggcgggtggggcttcctgtcacagaacgctgtttaaaaactcagtagcatctgggcgtgagcaggctttgtcgggtggagctgattggttgcaggagcagcaacagttccagagccaagtcatgacaccgacctccccaaggtttagttaaatatatcttatggtgaaaatgcccggagcaagaaggcaaagcatcatgaagaggatattgggagctctgctggggctcttgagtgcccaggtttgctgtgagttggggctgtccaaggtgggaatctgaaaggatttagcagctgcagccttgttgaggggaggaagggcaaggagttaaaaagtcatgcagtctttctactcacacagcctgtgggggcattttcaggattcttcagatgttaaactgcccatcacctatgactttttctccatttctgaccaggtgtgagaggaatacaagtggagcagagtcctccagacctgattctccaggagggagccaattccacgctgcggtgcaatttttctgactctgtgaacaatttgcagtggtttcatcaaaacccttggggacagctcatcaacctgttttacattccctcagggacaaaacagaatggaagattaagcgccacgactgtcgctacggaacgctacagcttattgtacatttcctcttcccagaccacagactcaggcgtttatttctgtgctgtggagccacagtgctccccaggcacctgcggcctgtacacaaaccctcatccgggctcggttcctctaccagtaacaaccacatcacgaggccaccgcagcagcattttgcacagcttaatattccttttgtacataggtagagttttaaccgtagattctttttggctctacaggtttgagactttggtctttattttcccttttcaatacacacctcctcctaccctataaatatctaacttggaaggagtagagtagctgataagaggacagaatcaaaataaatatttaagtgacagtatgcaggactccaaaagggtaaaaagtaaaaagaataaaaagaaaagaaacaccattccaataagcatgttgttagacattagttagacagtgatccagcttagttgtgtgtctcaagcacattcaggtctacctcaccacattatgtaccaacagacaagggcaaatatttgcatactatcccactagtgcagcaaagtaaaatttctttaaatattcacatattgataaatagctgtggagaaaaaactttaaaatgttatgttcccatatgtgtttttcaggcttgttgtataacctagaatatgatctatcctggaaaatataaccatgcatgattgagaagaatgtgtaatctgatcttgggtagatagatgtctgttaggtctacctggcttttgtgttgttcaagtcttctatttccttgttggtattctacttgtcctatctattattgaaagtgaggtattgagtcttcacctgttattcttgaattttctgtttttcccttcaattctgtcagtttttgtgcatcatgtattttgggatatgtcattaggtgcatatatgtttataactgatatattcttaatggatgcccttttatcattataaaatttcccattttatctctagtaacattttttggtttaaagtatactttgtctaataataatgtagtgacaccagtcatatctttacctatcctttttactttcaacttatgtgtatctctgtatctaaagtgtgtctctgacagtgtatagatgtgtgtgtgtgtgtgtgtgtgtgtgtgtgtgtagccactctgataatctctactttttgattggattggttaatccattaacatttaatgttatcattgatatagattatatctggcattttaattttattttctttctgtcttatgtcttttttgttcctctgtaccgccttaactgctttcctttgcattaggtgaatattttatagtataatattttcattcctttaatttttttcactatgctttttcaattattttcttggtggatgttttagtacttacaatatatatacatctaaacttgtcagaattcacttcagactttatgctaacttaactccaatgggattttcagatgtcacttctatataggtctatttcttattccctttattattgttattcacattatatgtatatatgttacaaacaataggttattataatttttatataattttataattatttctttatataatcttatgttttataagcagagaaggaaaaaaggaaagcaaatatatattgaggtgtttgtggttaaccttcttacttatcatttctgggtctcttcatttgttcctgtgcacttaatcatagccaaaaggtcaagaagtgatcatttgttcctgtggattcaagttgccatctggtgtcactgtcttactccaatatagttttgcaatctgccttcctcctttattcttttattatcaaatatgttacattcctgtaagtccaataatataattatatatgtattgttttatacagtagttatttaaatcagttaatagtagaaaggggataaatatgcagtcacactatctttttagtaagtgtgtggatgcaaattactgtttgaagtcccttgctcccagcctgaagatcttcctttattattgcttgaaggtgagtctgcttgcaataaattctctcagtttgtatttatctaggaatgtctttattttaccttcatgtctgaaagatacttttgctgaatataggatcttcattgatggtatatttctttcagcactttgaatatatcttcccactgccttctagctctgttgtttttgttgagaagtcagctgttaattttattgagtttctctcataaatatttgatttcctctttctactttgaagattctatttgtcttttaacatttttgctatgatgtgtctgagtgtggatctctttgcattcattttacttagagttcactgagcttcttagatgagtagattaatgcttttttgaatctgggaattctcagccattgtttcttcaaatttttttgttccttttcttcctttcctttttctggtactctcactatgcgtatattggtgtgcttaatgatgtaccacgtttctctgagtccctgtttatttttctttattcttttttctgtctgtttttcagattgcataatctctgtagatgtatctttaagttcactgattccttgttcagggagcctgaacctactgtttgaccctccagtcaatttttttatttggttattgcactttcccaactctagaatttctattttgttcctttcataaaaaaataatttttaccactttatagatattctctggctgataagaagtcatcatcatatcttttttacttccctcagcatggttttatttctttgagcatacttaaaacagctattttgaaatttttgtctgtgaaatccaacatctaagtcatagaaaaggaagttgccattacccaatttatttctcttgtgtaagaatcacactttcctgtttggggtatatcttataattttttgttttaaactagacattttagataacatattatattagttttctatggctgctcttatgggttgaattgtgtttctcaaaattcaagatgaaatcctaactcccagtacctcagaatgtgaccttatttgaaaatagggtcattgcagatgtaattagttaagataaagtcataagaatggaccctaattgtgatggttaatgttaggtgttatgttgattggactgaaggatgcctggataactggtagagcattgtttctgggtgtgtctgtgagggtgttgccagaggagattgacatttcagtcagtgaactgggagaggaagacccacactctttgtgggtgggcaccatccaatagctgcgcagctacaacaaagcaggtgaaagaaggtgggaggcttctggctgcctactttctcccatactggaggcttccttctgcttctcttgtccttgcgttcctggaccaaactgaggtttgggctgctatttttttacagacaaataacgagatgcagatgaactggggaggaagagagtttttatttctgtagtcagttacagggacatggcccggaaattattgccagactaactcaaaattacaaagttttttcagagttttatataccttctaagttatatgtctacatgtaagtgtgcattcatttaaagacataaatgattaacttcttttaatttataactaaggtctgagtcctgaagaccttcttctagagtctcagtaagtttatttaacctaaatgggtttaggtgctggggtgattagccttatctggtcttctgccaaatcacagaggtttggggagttccttcagacctccaataaatgtgtttgtggaggcctagcgagtttcttcagaccccctataaaacttgtttaatcctaaagaggacctgttaagaattactcctttattttgtcatgcttaaaagcccaggaaagtcccaggcaaaactcttggtgggcttttgctacattccagcctttgtataagggcactggcttttaatatttatcttaaccactcagtcagtaccgaaacagttgttatggagtcctgccacacttggacatcagactccaggttctttggcctgtggactctgggacttgcaccagtggcttgcaggtggctctcatgcccttggccgtagacagaatgcttcactgctggcttctttggtttgaggctttcgagcttggactgaaccactaccagcttctcttttccccagcttgcagatggcctatcatgggacttggccttgtaactgtgtgagccaattctccataataaataaataaataaataaataaagtttattagggagaattggcacacacaattacaaggccaggttttatatatatatatgtgtgtgtgtgtgtgtgtgtgtatgtacatacatgtatacacacacatacacacacacacacacatacacatatatcctattagttctggagaaccctgaccaatacactaatctaatatgactggtgtcctcataaaaagtgaaagtttggaaacacacacacacagagggagaataccatttaaagatgaaggcagagatcagggtggtactccaacaagccaaagaatgctaaagattgccagaaaaccacgagaagctgggcaagaggaatggagtagattctcgtagccctcacagggagtctctcagacttccattctccagaaatgtgaaacagtaagttcctattgtttaagtcacctagcttgtggtactttgttatagctctagcaaactaataaagctgctataacaaattactgcaaatttggtagcttaaaaccaaacaaatttattctgttacagttctggaagcaagaatctgaaaccagttttacagggctacagtcaaagtgttggcagggctgatttcttctggaggctctcagggagaatctgcttcctggccttttccagcttctgctgtccacctgaattcatggctcatgctcttttttgaatcactccaaacttttgcttccatcatcacatctcctttctcttctggagccacatcttcccctgtttccctcttataagagcacttgtgattatatttagggtccactcaaataatccaaaatatttttcccatctcaagatccttaataatgtattcaaagacatttttgccatataaggtaccatttgcaggtaccaggcattagggcttggttatctttggggatgataatccaggctatcacatatagtgactctggatattgtgtctctaccccatccagggcttgttgttatttgcttgtttatttattgtaacaactttacttgactatttcagttaagtccattttcctgcagggtgcagcctatgatgttattcctcagaggacagtctttggtatgtgcacagacatcttgatatgacggtggtttcagcagtgttttctttaactgtctttcttcctgatttttctgttaaactacctgcatctgtttgtatcacacttagccatgagcctccacacttatccatagtctggttcaattaaattcaggcccctttgcagaggtaatctttgaggtcaatctttgaagcttcttataacctcaggaggactcttcccagctgtctttattcccggttctctctattagatttttagctagtcatctgtggtttagtttgttgctctcgtggagctaccagcctcctcttaattgcttaccacaaaaatcttcattcatttccactgtacccttaaggcttggacttcctgaagctctgttccaaatagagtcttcctagtggagagctctctgttcttataactcctcctctccctgggcacaacttctgtgcccctgctctggagcaatgtgagaagagacattgcttttctttcctcagagtgataaccctactttaggagcaaggtgcttgatgggggcagtatcccatggtcttcttgtttgcctcccccggtatgaaacctccaccttatgagcaagctggggtgagggaaataaggacccagtattcttggtctgccatgccagggtagagcttctgccctaacagtaggtgctaggaagtgaaaaggagccctaggcctttcagcttccctggcccagaataggacttctgcaatacaaaattgaggaagatgagaattgttggcagactgtccctcccaggcagatatcgtagctcaacactggaatctgagggaagaaggagccctgtattcttggttgctcccacccgaagtagagtttctattatgctgagctctgtgtggtgggggaagtagtagtcatggctcaaattccaaggattttgttcttatggtgatttagtaaattttcctgaatagataattctccatttgctatatactcaggacaatttccagagacttaagtttttaaaataatttttaccaattaatagtgttttgttactaattagggagagtaaccatgaacctcctcatattgcaattctgaaagtcacagcctcccattcatgatgttatcacatagaacaggcctaaacagaagataatcagaagttcaacttttctttgactttctccattgagaaataaaggtgaagctgccatcttgttttgatcctaaacctgccacagagataattattcaaacacgtcatgtatcaccatcataaaataagcatgtattctgagagtattaaagatgaaaaacaggaacactatattttcttaaatcatagtttttgtaggaaggatggagtgaggtagaataaacaagtctaggattgcctagtttgaataatttcggtgggctctgaggccaggactatccctagttgcctggtacctggccatgggatgcttagggcagggggaatagtggatggagtgtaggagcctagtgacagcctgataaaggaggtgcttggagtatgggctctgtatcggttggtttgcatttgaaagatgtgctcccaagtgagtctttactatctctaggaattagccagagatggttaaggcccttagatgtcaaaacatttgggtaaaaagatgtggttgatacaccaacactgttggaatatgagacttctctatgcctcactttcctttggatactcttgttcattcatattttttctttacttaaagttaggtactctgactttgcctattatgttccttttatgattaataataacttgcctaagtctagtctttactagagacaacaatcatcaacttaattcactcaactctccaaagctaatgttattacagccaatttgaaaagtgataaaagggtatggtacactaacactaccaatagtgatagtctttgtaggcaatccataggtgaaaaaagtccttacattacaaaaagtataacatatgatggtcattatttgtcaagaatgaattccatttgagttccattcaaaatggaattttcatttcatacctacagctactgggaactgttttctgtttgggaatcagtctcttcatggccaaaacagagccaaggccaatccttctgtaggtctattcattaggctattttaagggcatgacccccaacaatcctcagtggagcacattattttacaaaaatcataaagcaacgaaaatctttctgaagaaaaactcctgagggtagtgacaccatccatatcattaaacaatttgcagtggttatcaaaaagtattttctcacattagctaatacaataaatatagtagtatatccaaaatcttggaatcacagcaagccagttaaaatttcttaatccaaaggcctatgtgtagtagaatagtcacatatttttgtggggccaatcaggaagtgatctttgtcattgctaatacttcatgttgactctacattaatactgaagatgagtaaaaacacttttagcatagatagatgatagatagatagataggtagatagatagatagatagacagacagataggtagatagatacatagatgagacatagataaaaagcaacctagttgtgtaagatagactcagaaaatcatttggactttttttttttaatcaagtctgggaaatcttggatcatggttgcaaaatatcttaccctttttataatatttaatacttcagatttgttcatttgttgcatggctctgttggtattctaaatatcactgtccccacaaatggttgaacaagtaatccaaagacaaaaattcaataaaagtcatgcttttaaatatacaaactaaaaatcaaatctctacaggccaaaactctttgtcaagaaaatcgacaatagtggagaagacctggacagttcttgaacatcttttctgcagctttggctgcataaggaccaaaaggggatggggggtggggagaggggaggaaaataaaattattcccatagatttaggaaaagatagattgttacacagccataataagtagccaccagaaccagttttatacctgttcaactgattaacaactcgtctcaatgaacatgcttttgcaagccaactaatcaatgtcagctcctggcttctgaaagtcagccagtcagtgcccctgagtgccaagcaatcagcaatagcctcaccctagtgactctgtttctgcagataatgttaactcatttacacctctgaagtttgccaatccctgaattccatgcttccccaaaacccagtataaatcagctgtctgttgtgctcagcaagattgtgtctgattttcataggtctcctttgctattatttccaataaatgcacatggtctttgtatttcacagcattgagtagtgtcaaatccttcgacagctgccaaagtatattttcttgtgggacatttggacttggacaacttttcttactatttttcttcaatgctcaaaacaaacctaacataaagaatatttattcttgtttgaaatgatattcagcatcagcagaaatagttaacatgctatcagaacttataaaatcaacatttagtattataagaaaatgaatctctctgcagatcattccagccagaatagtgatgtttattgctttgtacatcattgaagtcactgattccaaaatcagctatttcaaagcagttgtggattacatttagggtgattgtgtcccacatagcatagcaacaagattcttcactgctatcaaaaatattccattaaaaaatctatactagaaatatttcttcttattttacataatatactaagtgcataaaacttttaggtaattaattatgccttcatctaaaaaccgcatatatattatggtactagaggacaaaaaaagatattgcaaatactgaaataagtccccagttcctttgggcagcacgtttatcaaaacagattttatctattttggcaagctattctcctctctaattgtaggaaccatctcccaaacaatcttccaacatcagtggatttaactttaaatatacatataggagatatgtgtatatataggggattttcaaatttttctacaaatggtcttacttattagtctcagcattgtagcacagtcagacttcctcttaatgaatgtatatatgtacatatgtatgcataatatatgtctgtgtatatatttttccttgagaaaaatgcttttcaccaagaactaacatctggcttggctgaagattatagaagagccccatcttataattattaattatgcccatatgcacatgcttatcctgaatagatctgctgatttcaagccaaatattagtagccaaaagagtttctgcagatgctgtatattttagagtaatggcataatgttctgacaatgccagcaattgacctatatctccattcaaaatgtaattgtattaatcttttatttagaaaaatgattcagatctaatttttttcactctagattagtaaagcaatctaagaatttcgttttataaattaaccttttgtttcccctctcattctttttaccttccttggcaggctgtttttctattctgttctggtttttaagatacatacatacacacacacacacacacacacacacacacacacacacacagatgtaccttggagataatgtaggtagggttccagatcaccatagtaaagtgaatatcacaataaagtaaggcatatattttttttagtttcctggcacacataaaggtttaaagtacactgcagtctgttaaatatgcaatagcattatgtataaaagtgtacatacctcgacttaaaaatgctttattgctaacaaatgctaattatcatctcaggcttcagaaagttgttacttgttttgcaaatgtagggtcttgcctcaatgttggtggctgatcagggtggtggttgctaaaagttgaaatgtctgtggcaatttcttacaataagataaaaatgaagtttgccacatcaattgactcttactttcatgaaaggtttccctgtagcacgcaacactgtttgatagcattttactcaaagtagaacttttttcaaaattggagtcaggataaaaagaaggaggttaatggttacagaaatacagttagaagaaacaaattctactatttgatagtacagtagggaaattatggttaacaataatttactgtatatttcaaaataactagaagaagagaattgtaatgttccccaaaacaaagaaaagaaaaatgtttcaaatagtggatatcccaataaccctgatttgatcattgtacattgtatacatgtatcaaaatatcacaaatgccccaaaatacatacaactataataaattgatttcaaaatctttattttttttttttgagatggagtttcgttcttgttgcccaggctggagggcaatggtacaatttcggctcacagcagcctccgcctcctgggttcagccgcctgggttcaagcgattctcctgcctcaggctcccgagtagctgagtttacaggcatgtgccaccacgcccagctaattttgtatttttagtagagacggggtttctccatgttggtcaggctgatctggaactccagacctcaggtgatccgcccacctcagcctcccaaagtgctaggattacaggcgtgagccactgcgcccagcctaatttcaaaatctttttaaaactactaagaaaatttttaaaaaaatggaagttaatcatctcaaatcctgccactgctttatcaactaagtttatgtaataatctaaatcctttgttgtcatttcaataatgtttacagcatcttcaccagaagtagattccatcttaagaaagcaatttctgtgcttatccataaaaagcaatttatcatttgttaaagttttatcatgagattgtagcaattcagtcacatcttcaggctccacttctaattctagttctcctactatttttaacacatctgcagttactttctccactaaagtcttgaacttcttgaagtcatacatttggattggaatcatcttcttccaaattctgacaacattgatattttgacctcctcttatgaatcatgaatattcttaatgtcatctagagtatgaatcctttccagaagcttttcaatttactttgcccagatccattaaaatacaagcacgttttattttattgcatctatttcttgaaaacttttttaacccattgaattgtcttgaaaattaattgcttgaaaattaattgaatatgaatttgtgaatctatttctattttgtttctttgatctacaaattttattttcacaaataccaaactgttttgattactgttctttataatgtcttgagatcaggcagggtgagtccttcaattgtgttccctttaaaaattgttttagtggccgggcgcggtggctcacgcctgtaatcccagcactttgtaaggccgaggcgggcggatcacgaggtcgggagatcgagaccatcctggctaacgcggtgaaaccccgtctctactaaaaaatacaaaaaattagccgggcgtggtggcgggcgcctgtagtcccagctactcgggaggctgaggcaggagaatggcgtgaacccgggaggcggagcttgcagtgagccgagatcgcgccactgcactccagcctgggcgacagagcgagactccgtctcgaaaaaaaaaaattgttttagttattcattaaggtttattttttgcatttccatataaattttagaattagttggtctatttctataaaaaggcctgctaaaattttgagtgatattgcattgcacttacagaaaattgggggtagaactgccatctggaagctattaaatcctctaattcatgaacatgacatatctgtcaatttattaaggttctttaatttttgtcagcattgtttttggacttttcagtgcagaggtcatggacatctttaagaaaacataaaggccattgacttgaagaaactatttgaaacatgtaaattattccaaagtcttgtgtacagcatatgtaaaaagctcttacaactcaataaaagagaagaaatagcccaatttaagaattaacaaaatattttcgtagagtcttcacaataaaaaaataaaaatgaccaataaacacaggaaaagatgctctacatcaggagtcaacaaaatatggcccatgagccaaattcagccatccacctattttcataaagctttatttaaacacagagatgcttgggtttttttagtgtgttatcaatggcttctttcatgctgcaacggtagaactgagtagttgccattgagactgaatcacctgcaaggcttaaaatacttactattcaaccctttatagaaaaagtctactgactcttatgtcgttaataatcagggaagtgcaagttaatactgtaataaaatatatagccactatatggagcatatatgctatataatatatatgctatatatatgttatataatatatatgctctttatatatgctatatatatgctcctatatagccactatgttggctaaaagtgaaaaaatgactactataccaagtgttgacaaagatgaagtgtaattaactaagttagatctatttaaggacatattctctttagtgcgaagacttctccccgacctgatgttgccattatgtgaggaaggagatcccatgaagtgactccatctgacggccagtttctgcctctgaaggaaccccagagcagttgcggtgtcactgtttcagtagccctgttctctcctggtacctccagcatcccaatcaattcctccagatccgcctgagacatacctgacctcagcaaggacaaaaatctcctttcatctgaagaaatcattggctcaagaggaggactgagccacttatttcagtgttctgatagatgtaggggttgctgaaccgttttaagaagctgtaggaaattgtttgatgtaaactccctatatggccacaagggggcaatgcttcttcaaagaagattaacatttgtccaaatacacatattcagcaattagccagagattatccttttaaaatagtaaattatctcctactctgtttcaattcacgtgtctgtttcattcaatgcatctatgcatttatccattcatctacctaactagtatctgtatttattctagtctaacagagtggaaaacatcactttggaagtcaacacttttttgaattatacatgttatccttcaagcccacattaacttctgtagtataactttacaaggttttcacccacatacagcccaatatccagtcacactaatctgtgcctaaaattcccttatccattctttttatggggaaatctatcatggtttgtggcccagttcaagcatctccccatccgtactcttctttgactgggtccagaaacagatttcatcaccctttccttcgtcacatcatctagacacactggtgtctttggcaggttccattggctgatacctgagtcttgggactaggttgactgaagacttggactgtgtctctttcgtgaatgaaatgaggcccaagtactgcctaatttagtaggcactttgtggacagtatatatgtattgaatatatgcatatataaattaaaagaaaagaaagcacatcaaaacttaaacaacttttaaaaagcaccttagggtactggggaagaaaaggtttggattgtagattgaggaacgtggaccattgtctcctattggactgcgatggtgttttctttgagtggatttgagatgacaccaaatataaatacaaaaaaaatcatttttgtgcttctgaaaaaaatgtgcttctcatgttattttaacttatatgacttataatacagatcatccctatttcaggggtgctttagaatttatcttcaatttctcccttgtatcttgcctgtgttaatatcaaaagttaaatttattctttatattttcatagttgatcgattttgaagtgtgaataaaatatcgaatgtttattcaaactcaggataagagccaccaaaaatgactgcattacggatggttatagatctatatcttctgcagaatttttctatcctctctttccctttaaagatcacagctcctccagaacagataattccagtatttcctattttctttttctaggtacatttaaaaaaatatttaatttacctaatgtgtaatttagaaaaaaatatggagaaaaaataaaattgacttaattgtattatatcatttctgaggatcatctaaaatatggaatgaatacatctgaaaaattgcaacaaaatttaagttctctgaggacaaagggaccatatattctctatgttctgattcatgaccttagcttgtaatggggtattatgcccattgtgtgccctcaataaactttattaatactcacaataaaaaagaaatgccactgtacatgttaatcgtgcggtttcacaagagttcctctcttctaccattgtaaaataaggccctttctattgacatatccagccatcttaaaggtctgaggaaaagttgagggggcttgacagacagaaattctaaactgatgcttatctgtgtgtaaagaaaggattactgattcccaatgaatatatcttcagcaattctaaatttggacaaagtggggaagtgcttcctttgacagagacagctttaagtgaaagcacttgtgaaagggcggggcctgctgaaagaattcagttgagggtgaatttacagagtttcagctggttgggaagactggaagaccacctgggctgtcattgagctctggtgccaggaggaatggacaagatcttaggagcatcatttttagttctgtggcttcaactatgctgtgagttatggaagagaaactccaggatatgttactaacttgggtgaatgagaaaattggggtacagacaaactcatgcaggtagacactttaagaagaaaatattattttggggcctaatgacattttgttatctctctaagcaggggtgagtggccaacagaaggagaaaagtgaccagcagcaggtgaaacaaagtcctcaatctttgatagtccagaaaggagggatttcaattataaactgtgcttatgagaacactgcgtttgactactttccatggtaccaacaattccctgggaaaggccctgcattattgatagccatacgtccagatgtgagtgaaaagaaagaaggaagattcacaatctccttcaataaaagtgccaagcagttctcattgcatatcatggattcccagcctggagactcagccacctacttctgtgcagcaagcacacagtgctccccaggcacctgaagcctgtacccaaacctgcagttgaggttccagccaaaccccacagtgggagcttacgtaggcagagatgtagcctagttttcatctgcatatgcaagtgataaataaatgtataaacactagtgtggcagtatgagaatggtaattaaagaaaagaaacttagcttaataaatgaccatctctaacaaatgttttattatagttacagtatttgaaattgttacaagcatccagccagttttggggcaactgggaattttatgccttgctgatgggatgcaaatcagtattatgacactggaaaatcatttgccagtttcttataaattgctcttaacataggaccagaaattccactcctaagtatttatctataataaatgaaaatatatcttcacacaagacttttgtttacagcagttttaaccataatagccccaagctggaaacaacccaaatgtccattagctggggaatagaaaaataaattgtggactattcctataatggaatactacagagcaataaaatgcaataagctagtgatacaggtaacacatgacggatctcagaactttatgcttcattgagtgaatggttaaatatactgtggcacatacccacataatggaatatgattcatcaataaaaaacatgaattattgatgcatgcaacaactttgatgaatctcaagggcattatgttgagtgaacaaaagtcaatctcaaaggctatataatgtgtgatttcccttatataacactatcaatatgtaaaaattacaggacagtggttgccagaagttatgggtggggagtgtgtatatagggagtttatttagggtgatggatggaatagttctgtatcctgattgtagttgttagggaaatctatacatatgataaaatgtcacagaagtatatatcaaaaaaagagtgcatataaaaatgggtgaatccaatagcaaagacttggaaccaacccaaatgtccaacaatagactggattaagaaaatgtggcacatatacaccatggaatactatgcagccataaaaaatgaagagttcatgtcctttgtaggaacatggatgaaactggaaaccatcattctcagcaaactatcgcaaggacaaaaaaccaaacaccgcatgttctcactcataggtgggaatagaacaatgagaacacatggacacaggaaggggaacatcacacaccagggcctgttgtggggtgggggatgggggagggaaaccattaggagatatacctaatgctaaatgatgagttaatgggtgcagcacaccaacatggcacatgtatacacatgtaacaaacctgcacattgtgcacgtgtaccctaaaacttaaagtataataataataataataaaagttctttaagcaaaaaaaaaagggtgaatcagaataagatctgtagtttaataaatactattgtatcaatatcaattttctggttttgatactagtacataatgataatggtacatagctatggttatgtaaaatgttatcattagagaatgctgggtgaaatgtgcaagagaactctgcgttatttttgcaacttctacgtgagtctaaaattatttcaaaataaaaagtaaggatgtagaaaaaagatttttaacaaacatttacaaatttttggaatataaaattttggaatgtggaattttagaacatggttggaacataaactgggcaaccactttggtggattttcataaaactaaatgcgtttctaccacaacccagtgactcacatctaggcatttacccaagaaaaataaaaatgtgtcaacacaaagacttgtacaagaatgttcacaacagttttattcataatagccatcaatttgagaaaacacccataaacaagatactaaatcaataaatttttgtgtcacacacattcaatggaatattaatcagcaataaaatggcctgaaccactgatacacataacagtacaaacaagcctagattatataatgcctagcaaaattgccaaatacaaaagggtatatactgtttgattcaagttatgtgaatttctaaagtagacaaattaatccacggtgaaataaagccaaacagtgattacatctgtgagtgggaattatttgggtggagcacaatgaatttttataagctaaaggaaaagaaatgttctatttcatgataggggtgtggtttacaaggctgtttgcaattttcaaaactcatctaactccatacttatgacttgtttatttcactatatcaattatacttcaattaaaaataaactacagaaattaatcaaataggaaacaaaaacaaaacaattaggggaaaatccaatgccgaataaatttgaagaaataaaagagttaaatactcgataatgttgataatgaggaaaatagaaaatagttaaacaatgcagtacgctgaattctggcccccaaagatgtccatgtcaaaaaccccagagtctatgaatatgctgcttcacatggtatattagttttctagggctgcagtaacaaagtaccgtggactgggtggcttaggacaacagaaatttactgtctcctggttctagtggccaaaagtctggaaccaaggtgttgcagagccatgctccttctggggcgctagggaagatttgtttcagacctcgttccgagtatctgatggtcacaagcatcccttagcttagagatggtcatgtcctccctgtgtctcctcccatcatctttcctctgtttgtgtctctgtctcttcacgtgacattcttttcataagggcaccagtcttattggactaagggcccgcactactccagtaggatctcatttcaacttaactaatgacattggcaatgaccctatttccaaaaaagttcacattctaagcttctagaggttagaacttcaacatatgaattttctggggatacaatttaaccgaataacatatagtgaaaggaactttacatacatgattaattcaaaaatcttgaaatgagaagatttatcctcaattatccaggcagacccagtggaatcacaaggatctctataaaagggaggcagtagacttggaatgaaagaaagcaatgtgatgagagaatgagaacagcctcgaagttggaaaaggcaaaaaaaaaaaaaaaaaagaaaaaagacagattattccccatagccaccagaaggaactcagacctgctggtaccttgactttagtccagtgaaactgattttggatttaagatctccagaattgcaaaataataaatgtgtgctgttttaagccactgattttgtggtaatttcttatagccacaataggagactaataaattcaataataggagagattaaaaaggagacatgtctggagataaagtagaaattaaaaaaaaattagcataagttaagtacaatttaagccaataaattttaaaactttaaaaagtagaaacaatttgaatgaaaaacatatactaccaaaagtaactcaagaagaaatagaaaaactaagtagatttataaccattaaattatttgataattggaaatgaaaatccctaaagatttagtaatagaagggaaatttttaacctgcatgtgcgcccactacaaaattaaaaacaagacacatgctggatgcatctgtaaataatataaccaataagattttagaaattaaggttagatggggaactcttacaaataaataagaaaacattcaaaataagaagagacaaggatataaaaggcaattcaaaaagaagaaataggaatggccactaaatatgtaaaacatcaacttccacagaactcgaggaaatcaaattaaaataaattattgtttcatttctatttgatcaacaaaatctaaaatatctggtaacattaagtattggtaggaatacatggagatgaagctgttacacttttccagatgaagaaaaacaccacacagagaatttaggataacaatttgcctaaactagttatgaatttgcacatatctaataatccagcaatacaaatttctgatatctacataaaggtagtcaaaatgtaaactaggaggcatttacaaggatgctcactgcaaccctctttaaaaataagtataatcacaagaaaaaaacaaccccatcaataagtgggcgaaggacatgaacagacacttctcaagacatttatgcagcctacagacacatgaaaaaatgctcatcatcactggccatcagagaaatgcaaatcaaaaccacaatgagataccatctcacaccagttagaatggcaatcattaaaaagtcaggaccaattttacactgttagtgggagtgtaaactagttcaaccattgtcgaagacagtgtggcgattcctcaaggatctagaactagaaataccatttgacccagccatcccattactgggtatatacccaaaggattataaatcatgctgctataaagacacatgcacacgtatgtttattgcggcactattcacaatagcaaagacttggaaccaacccaaatgtccatcaatgatagactggattaagaaaatgtggcacatatacaccatggaatactatgcagccatacaaatgaagagttcatgtcctttgtagggatgtggatgaagctggaaaccaacattctcagcaaactatcgcaaggacagaaaaccaaacaccacgtgttctgactcataggtgggaattgaacaatgagaacgcatggacacaggaaggggaacatcacacaccggggcctgttgtggggtgaggggaggggggagggatagcatttggagatatacctaatgtaaatgacgagttaatgggtgcagacaccaacatggtatatgtatacatatgtaacaaacctgcacgttgtgcacatgtatcctagaacttaaagtataatgaaaaaaatacaatacattcattaaaaaaaagtataatcaatagtggaataaaaaatagtggtttagtcatacaatggaagtattagccattacaagcaaagaagtggttctatacatattttcttagatgaatcttacaaataaaatgttggatgtaaaagcagaatgatacatactgcatggcaccattaataagaaatcttaaaatacaaaataatgcagtatattgttttgtaatacatacctgtaatggttaaattctttttttttttgagacggcatcttgctctgtcgcccaggctggagtgcagtggcacgatctcggctcactgcaagctccctctcctggattcacgccattctcctgtctcagcctccggagtagctgggactaaagggagcgccaccacgcccggctaatttttgtgtgtgtgtgtttttagtagagacggggtctcaccatgttagacaggatggtctcgatcccctgacctcgtgatctgcccacatcggcctcccaaagtgctgggattacaggcgtcagccaccgtgcccggcctgtaagggttaaattttaaaagacatgcgtggaaacttcccaagagtggttactatctttgaaagaataaaaggaacaaggactattgttctagctttgtctgaaatgtttgagaaaatctgaaatgtagagagagaaagaatatttttagaaaacatagcaaaattcatcatctgtttatgtgtttattctcattgctggatacgaaggtgcctgctatataattttctgtacttttgctcatgataattatttcataaatttaaaaaataatttttaaatggatagcgacaatcatagtttttactatcttcaccagtccacagaagagaatagcaccttcattacctacaactttgccagatgtatttctggtaggccacataaatggcaataaaacatcaattggaaaaaatctctaatttatgaataaaaggatgttcaacctgaaataaacaacccaagactctttcccctgaaccacaatgcatacattttcaatatattaaaaagaggatgtggaaaaaaaatccaattagttacctcttagcaatgggagatgtggccacaaaatgtcagcattttgtgaatattaactcccctgggctctcaaagtttattttacttccttttttagcagtttgaaaaatcgaagaagaaattggaatagtatttatgtctgattagagtggctttcattggactgaaatattcaagaataaagtagaatacagtgcctaggatgaattcgtggtcagcatgagaagagggctgttgtcaagtatatgagagagaggaagaaatgggaagagctgggagtctcaacagtgattctgtggcttcatacagatgtgagtttggggatttctacaaagaaccaggaagagtctgaggacagtttgccacagaatcactcaactattcccatttggatttctttatggggcagtccaacaaaaatacagcttttggaatttggtgctttgacataaactgctctatcagatgaagtttcagcataaagtggaaaagaatcttcattctttcaatgtccaaagagggaaatatttttattttggacatttatactattaatagttttgaatatttttactgataaagcagcattttgtgagaagccttgtcttcctgataattattaaaaattatagaattgcaccaaacagtacacatgcactcatggcaacagcatagctaaagatttgaattcagagggcccatggattctcccatcctagaacttcaaataaaattaagcatagagttatagtagaaataataggcctttgccgttactattgacagtagaacacacaactggagaaaatacagaacctgggagtcttttttttttaatctcatttgtctgagctgttgctttgccattgtgaagttccaattcccttggtttgatgggtaagtaggaaggacgggaggtgatgacttctggtttgtctcctgtgtcaaagccaaggattggtgagcagcttcacctttgactcaggttggtagcaagtgaacaatcaaaacatgaatgtatatttgtaatcaaagccatgattcataataaattggtttcagataagcccctcagatttatcacagatcaatttcctaaacttggaaattttaaatgactaatctccttttaagaattccttcaatattgtttcatgcatgtcctttaccagatataatcctttgtcatttgttaattaaattataagaaagggcaaaacgatgtttaggatagaaccaatttcccagcctagggattatcatagcacattcacacttgacccacccagaaaccacatttcagaggcagcttccatacagaactgagggaccctgcacctgtactgtcagggtacagagcagggctatttcaacaggaaggaaatcctgccatcatactgcttcccagtctactgtgagtattcatggtctccatctacttaggtacaaataattgcaaaccagagcatggctacctctcagcactcagaggtgaaacgggactaaggagtagatgtctcaaacaatgagaaactattccctgcaccactcagtgatatgctattttgacctttataaaagaactggaaatgttttagagaccttgtctgcactttctttcttagctatctcttggtccctttatattaattcgtccattaagttagtgaaactagaggctgggttcacacatataatcccagcactttgggaagccaagataaggtcacttgaggccaggagtttgagaccagtctgggcaacgtagagagactccatctctacaaagtaaaataaaaatttagccaggcctggtagctcgcaactggagtcctagccatttgggaggctgcggtgacacaattacttgagcctaggagttccaggctgcagtgagttctgattgtgccactgcacttcagtctgggtgacaaagagagacccccaactctaaaacaaaaatttttctatttaaatttttaaaaaagacaatgaaatcacatggaagattaacatctaaattccatacaatcacgtaacagcatacaaaaaattcagccaccaacttctgtggtattgacatgcacaaagttcttgcaaccttcagataacacgttctgtgggagtatattatagcattgtatcatttgcatcacagagagatcttgtatgcttatcatgacaaacaatgtcttatgcttatcattaaaaatttttaaaatgcccagccacagaatgtaacaagtgagactgaatactttggatcaatgggatagaaaatgtgatatcaggacaattctaggacacatgatctaagaagtataattctacttgtgaaggcaacaggactgaatatactgatcctcctcagtctagtaaataaaacttagtgtcagattttgaaatgattacattttattgctgttataatttcataaagagataaaaaactgagcagcttctgaaagtcgagaaggactgatttttatcatttgattttgaagtagctttacttattatagaacttaactagggccctagacctcagtaaggaggaagaaagagatgcagtaattgtttagaataggactgcctttcacagagaaagtcaaatatctgagtatttttcttttaaatttaattagtttctgatggcaaaaagtaaatatatgctaaatgaataatatcaatgtatgtcaactggttcaactgcagttcccctcaatacaaattgcttttcttatatcccttttctaggttctgtctatcctaatgactagggaaagacaactagacaaagtaaagattcaggggtgagccagacatttttcctcatctgtgcatagccatgtagtctatgaacatgagactcaatttcctgtttggggagatagcatcagaacccaggaactacatatacacaccgcagggccctggtaggcactgaactttgagcttcaggcagcacaactcacatttgtgcaaagagctacatgccacatgctgttctccagcctgctgtgtgtatttgtggccttcagctactctggtatggatggttccaagtgtgagtaaaaatgttaaggatggaaggattccaaacaggcatatggtatttctcatggacttgaggaggaaaggagaaattgtaaaaaagcgagcatattatgattttagtttggtttgtctctgggtcctaaattagtctagctcttacgatattttattcactatatcaaaggatcagctctgttttctgatttttcccacaggatcaagtgtggcccagaaggttactcaagcccagtcatcagtatccatgccagtgaggaaagcagtcaccctgaactgcctgtatgaaacaagttggtggtcatattatattttttggtacaagcaacttcccagcaaagagatgattttccttattcgccagggttctgatgaacagaatgcaaaaagtggtcgctattctgtcaacttcaagaaagcagcgaaatccgtcgccttaaccatttcagccttacagctagaagattcagcaaagtacttttgtgctcttggggaactcacagtgtttgaagtgatagtaaaagcaaaacaaaaaccctagggctcaataagagaacccctctactccccatcctttgctacaggagccaatctgaaatgcacacctgcagatctcaggcaagagagggtagtgactgtggtctgtggatttaatctgtggtctggatcagatggtttaattccaagtaaaacctccttctatctcacttggaaacaggtgttcagagcaactttcttctaatacttcaatttttacttaaaatagatcatacagaaaatgtgtaaagttgtctaaagttggaaagacttccacataataacttaaagtggcagtttcacttaacgatgctcacagcagaaatctgggtctagttatcttgaatcaccataaaaatcatttccttagccctttcctcttaagctttatgtcagttaggatacaatcagggaagcagaaccatcgtgaaagatgtagaataagattaattataaggattagacctcatgcaattgctggaacgggtggctctcggaagttacttagttgtttatgtttttatgaaattgtaacaggaataaaatgtaatctattcaaaatctgacactgagttttatgtactaggctgaagaggatcaggacattcagtcctattggcttcacaagtagaatagtacttcttagatcatgtgtcctagaattctcctgataccacatttctatcccattaatccaaactattcagtctcacttgttaaattctgtggctgggcatgtttttcatgtgtaaaataaagtcgtgataagcatgccagatttctgtgatacgatgccataatctgctcttactcctatgcaaagctgtttgctgaatttactctaggtcagctagactcacatttgggaaggagagttgaacatggacaagagcatgcaaaagctgtgatttgtaaagacattttggaacccatggtgacaggtggaacccacgaggacaaactaaaacttgtctgtctcttacctccttcaatctcatagtgttggtgaccttcagaagaaatggtgttatttgctatcatgctccctgggtacttggcccaagaaaaagagaagctgaaagaggagatctggggggagtgggggagttgtgaatcaacaataagatgagttagcagatcagagcaacatatgtgagttgccacagtgcctggagcctggcacctgccttacacaatttttttcaacttaatcgagaacaatatagggaaggattttcttagaaatatatttccaggtagttacgacgagacagtacaaagttaccacaatacccccaccttgtaaacttgacatccatatgcacctcttttaatagcacttagctttcaaataaaggcaattttaaaaagcatacttcctgccaatatgatgccactgttcttcattcaaccacacataccctaaccctctcccctaaagagaatacaaagtatttattcatctttgggtgatgttctttcctcttctagctgagtcacactctcccattgatatcctgtagtttagcttctgagatataacaagctataagagtaacttattaacatatctttcactattatgtataggcaaatgggaggagagtaaaaaatggttgacatgtattttaatattttcatatcacaatgaaaaagaaatgtttataacagtatagtctttttttccacaaatggtcacatgattgtagctggtttctataactacctcttccattacccatttcataatctgttttcagcaagcacctcaactcactggtacacttgactttctataaaacaagctccttggtcaggagcaatgttatacagaatgccataaagttgagtaaggaattctctaagcccaccactgtggttttgccagaagcactgcagatgtggaaggaaagtccatattcagaatgtctaagtggactaaaacaaagcaaaacttgccagcagccagagaaagttgatatatcatgatatatcatgatatatcatgtctttaagaatgattgctgaattctcatcaaaatcaacagaagccaaagaggaaaaagtatttttagagtacttacaaaacaaacaaacaaacaaacaaacaaaaaaactctctagctagcttcctatgaacatgaaagtctaattttaaaccctttgtcaaaaatcattgttaaaaaggtggaaagtcagtgcacagattgggaaattatatttgcattggtgtatttctgaaaaagattcaaatgcagaatatataaaaaacttgtacaagtcaacaagcaatgagaaaacaatacaaatggccaaaacttgaagagacacttcagaaatatgatatctaatagtaataagcatacacaaaaagcacttaatataattactcattaggaaaatgaaaatgaaaccccattgagtgatccccctgtgccctttcagcaccccagttgtattaatgtagccaggaggaaatgaccacaagaggataatgaaaaatagtgactacttccaggggaagggatggccaagtaggttttctagaaacttctgttaaattaagtttagcctaaagctgcctccttatttatttaaaactcagggcaaaggtttctccatacacagggccctgtaacctaacaggatgcataaacaggctacagtctgctctctaccaatccctaagtttcggccataggtggccaactgttcaaacatgttcaaataaggcaaatgccaagctttaaccaatccatctgtttctgtaccttacttcctttttctataagtcactttactttctctgtccataaatattctttgaccatgtggcagtgacagagtctctctgaacctgttctggtctggtggggggctgcctgaatctctaatcgttctttgcttaattaaactctgtaaaatttaattcgtctaaagtttttcttttaacatgtccatcattgaaccatgttcagtggaagaagaaaaagcagtaacaggctaaagaccggaacactgaaggaaagcaggttttactaggaaaaaagaaagttggtattcattggccatactatatgtcaggcactatttatacatttcaaattcattacctaatttaagcatcatacaccctacgagataggttttagtcttccaattttttatatttgggaaatgagacacagctttccctaactttgaaaagcatctctaactaaagtcagccagggtgtaacatcttagagggctcctaaaaaatcaaagtttggactatggagaagcaaatagccacaaagcagcagcattggctttctcagtgaggatgacaagatgacaaacctaggcacaaattgcctcaggatcaacagatggaggaaatcaccgactaagtatttaagagtgctgaatgtatcagtgagtctcttctacagtagtgtgctatgaagcacaagaggctagagggaaagatgagatactattccttaaacactccaagcgggcttccatatcaaggcctttgcccactctgcctggaatgctatacccccacaaaacctcatggtgtagctctgaactcctctacgtctttacgcaaaagtcaccactttgtgaagcctttatcgaaatctttctattgtatattccttctttgagaatcaggctctagcgtattccacgtgttgagaactaaagcaccaagttctgaagcactgccacctggtgtcccgctgaactatttggtgaggtttacgctggcttccctgctgccctccagtgttcacgggctaagctgtgatgaagcctggttgcaataggagctagcatttctgaaccagtcagtaaccttcccatggtagtaatcatgtgagacaggattcagcaggactggctgagacttttttttttctttgaaggaagcaatttttatcccttacgcagcttgtccctgctactgtgtcttgtctccattgcctggatccagacctcacaagttatttatgtatttatgtatttatttatttatttatttattccaaggcagaagaatttttcttagtacagaacaaaatggagtctcctatgtctacttctttctacacagacacagtaacaatctgttctctctttcttttccccacatttcccccttttcttttctacaaaaccgccatcgtcatcactgcccgttctcgatggtcgctgtctcttcggagctgttgggtacacctcccagacggggcggccgggcagaggcactcacttcctagacggggcggccgggcagaggcgctggctgggacttttttaaatttcatttttaaaatatttttcccttaatatgtgaggtcgattgatttcaaaatggcaaatataatatatgggatggtttaagctaatagaataccttggaaacaaaggttggcattattgcacaaggtgggaagtttttctctattaagtgagagttcatctactgctctgtcccttactgtagtatagaaatatcctaagaagtgagaacaagagtcaatgatggagagaaataagccattgtagggaacacagtgcagcatactctctccatgttatcatatgctgcccaacctcccaatatagcatcataacgccactgatttcccactaacagtaagaaacatgatagaacatggatatgtattatagtacataaaatatgctatgcaaattgcaaaatgcccctcggaaaaatactgaattttatcttgtggatagactgcactgcaatttcagatacagtctcccaaccccccaatattttctatattgaatgcatctggttgagtgcctaagatacagaagttattgtattagatgatttattcggttggtgtaaaagtaatttctgctttttccattacttataatgtaatggcataaccattatataggcttggattgcatttctggacctaccactcattggttgaattatcttgagcaaattacttaataacttttatgcttcagtctccttatccctacaatgtggatattgatagtacttactacaaagggttattttgagaaataaacaaaatgacaaatgccaatgcttagcccagtaccaacaaaaagctactggttacttacagaaaaggaaattgaatatgagagagattaaatgtcttgcctagcatcacaaagtgtcagagttgagccttccctccatgccttatgtagagcagataccttttctcaccccaagaataactctctatctcattacagtgctatattgtctttatagagcttatcaccgtatagaattatcttattttgtaaaaactcatttatttaacttcttctcattgcactctagtcccttttctatctcttcaccaccatgttctccatgcctggaacaatgcctagcacacaggagacacaaacaatacatgtttgttgaatgaatgcacaaaaggtaaaattatgtccagagtccttgcaattcaaatattaatataacagtttaagctggattaatctttgtgttatttatccagaattgtcaagatttatatcctgtaagtttcttaacgtaatatttaaatatgtaaaggctaaatagttgaatactagctttggtttatctacattggtttatttttgcactttgggggaattaataaataatcttactaaaaattttatctataaatccctcactttactcactgtggatatgaggtagaaaaaattctgaggcatttttctctgtagtgcatgcatcttatcttttatgttgcaaaagtttttcagaggactcatgtatatgtatatatttttatgttttaaaaaattctgtgtgcacacatacacacacacacacacagacacacacactccttgcataagagttgatatacaggcccactgtttgctcaaaacagagaaagcaaattgaccttgtttcccttcactatcagggtgggtacatttagaatcctccctgatatattaggctgttaagaatgataaagattgatattactagttgagttgtcctgtggccaaagtggggaggaaggaaactaggatcatgcactcttccagaaagagaatctcgtaaggctgtatttagttgccaacaggcttggcctttacttcaggtcaaatgtgtggctataccttgcaggattctgtcctactattatagatagaggaattctccctgctgttagaggtatatcttcttgatctggacactgctccttcaacatgtgggtgaatttatcagtggatcggtgttctcaccagaaatgagctccacagcatgtaggctttctgagtgattgtggccatgacttcactctcctatgataaagttacctgaatgctatgatcttctccatgcatctggagaagaaactacagaaaagaaactactacagcaaagacttggaaccaagccaaatgcccatcagtgatagactggattaagaaaatgtggcacatatacaccatggaatactatgcaatcataagcaggatgagtttatgtccttggcagggacatgaatgaagctggaaaccatcattctcagcaagctatcacaagaccagaaaaccaaatactgcatgttctcactcataagtgggagttgaacaatgagaacacatggacacagggaggggaatatcgcacaccagggtctgtcaggggatgggggactaggggaggtataacattagcagaaatacctaacgtaggtgacaggtcgatgggtgcagcaaaccaccagggcatgtgtatacctatgtaacaaagctgcacgttctgaacatgtaccccaggacttaaagtatgatttaaaaaaaagaatggcttgtttgtctagcagccatccctaaccctagtcctcatgcttctgaactaggagtcattattgaggcttccaggatttcctttactacccatacatttatctccttttctgggaaggaaagctagaagttaaccattgagatactttctaatcctgttctaattttttagaacgtgatttaaatgtatgtggaaagtgctgtcccctgattttagtacataccccatgctgtttcctttgcttacttcagttgttcactggaaaggttttaaaggcacttcatacactaaatacctagaggttaaatttatattctgaaaaaaattaatgctatcttatattattaaatttcccttggatatatcttatttctccaattatattttgggctcacagggaatagggaatgttgctttgtaatctttttttctttcttttcctctcccctagatgaggctgtagctttgtaatttttaattcctcagagctcctagggaaattcaaagcacaaaaattactgtttaaaaaatacatgcatattgaatcaaactaacgttatatctggactgtgacagaagcaagacagcataattcttatttacttttaaacaactttattggagtatgtttacgttccataaattcatccattttaaatgtatggttcagtgatttttaattaataactgatttatgaaactattaccataatctatttgtaaatccttttcaacactctagaaagatccttcatgccaaacttatagttaatctctaacccaaccctggccccaggcaaccggcttacatctttatagatcttccttttctgaacatttcatataaatggaatcactcaatatgtaatcttttgtggctggattctttttcttaaaatagtatttttgaggctcatctgtgttgtagcatatattatgttttattttatttatttcatttttgcttatttattttattttatttattatttatttatttttgttgccgaatatcattcacatcttgtatgaacatactgcattttgtttattcattcaccagctgatggacatttgggttgttctcatttttttagccttaataaagaatatccacaaattagacttccattatttttagaacatatctaacatgtaaaacattcatggtgcatcacaaatgtaggtggcatatcagattccaattataaagtctagagctagacagatatatgttctaattcttaatatgccacttaggtaattgaccttgagtgaattatttaatctccttgagctttgggttattttttgtttgtaaattagaaacagtaatgtctctattgcatgactttcttattagatagatgtacataaagaaaaaggtaatttagatgtgtgcacatttataatttgagggggattcaaaagttgttttttaatgtttgaagattcaaagaaaaatgcttttcctgccacaaatgccatcccacctgtaactccctctaaatttgaataatagcagtccacagttaggcagcgcacttctgaaagggtgtcaattctcgttgtgttccacactcatgggggatttcctcaaagtttatgaagttggcctgaagaaagcagttacttcgacccctctttgtgaaccacaggaaactgaacatagggcagagcgtttctaggacatttatgggagctggtctctgattggctaggcaaccagatgcagaatcctgttttctgaagcagaatatttccacagattttggctgaaaaacgtttttctgctgtgggtacgtgagcaggaaacatggagaagaatcctttggcagccccattactaatcctctggtttcatcttgactgtaagtccaggggttacaggagacattcttagtctggggtgatgatgaggaaggaggaggatgcagtcagacactctaggttttatttggggatgtgtgaagaaaatgccaactctgtagagagaccaatttctatgtctgactcttttttaaaaaaacaggcgtgagcagcatactgaacgtggaacaaagtcctcagtcactgcatgttcaggagggagacagcaccaatttcacctgcagcttcccttccagcaatttttatgccttacactggtacagatgggaaactgcaaaaagccccgaggccttgtttgtaatgactttaaatggggatgaaaagaagaaaggacgaataagtgccactcttaataccaaggagggttacagctatttgtacatcaaaggatcccagcctgaagactcagccacatacctctgtgcctttacacagtgctgttcaggcacctgcagcccatacgcaaacctgtgtctggtgttgcactgttaccagcattgacaaagaaccatgagtaggatggaaaagacaagttcgttgaattacagttttttttcaagaggattgtgcaaacatagaaaaataagcatgctagtgatcataactaactaccacaagagcaaattaagtaaacatattccttatgacagatagatgtcagagtgctaatgaagcataacgcatgacctggtaactgggccgttactaaacaatactaaccccagctcccaacagctcattaaccacatcatggagtcagacccattgcctgctcttttggcatgattctgaaagaacccaatagttactcaaatctatctaaaacaatctgggtaaacaaaggcgatatttaccccctcattgttgctatgtcctgaaaacgaattcttctattatactttatcacagcacaaaaggagcatgtcggcatgcccctccctcacacacctggcctggaaatatgcatgtttaataccagaacaggtgatgctgcctcctttaatccattggggattttggttttgctttagttcaacttttcccccacatgaacatttgtatttttatttcttctcacatgtggctattttcatttttaaatatcactgataatatcataaaggagcactgatgaaggaccttcactattttacgtggtctataccccagcttgtactgtgattgtgatattggatgactaactgaactctattatcaaagtctcttcatttgtaatttccaggtatattaagtaggctgagtgtttggtgctctcctccttttgcagatttccaaacaacccaccagtttaaggtcccacttgtactctagaggcatctaattctaagcgttcttgggggctgttaagatgaagtaagttgcttctgggcctcctcatctaaaagctagaatttcaactttctctaaacatctacattaataattatttatccagctcctgtccagtttcctaaattatgctgctattgcatttcctctctcttttgtggatttatgtttttaaaaatattattgttattatcacatatttaggaaaaaaagctggtacattttaaaaataataatggagtgtatacaaatctctgactggacccatttagagatatatatatatagagagagaattacttttttcaaaatttattcacaaggtagtaatgaatctatttgactatcagatcagaagcggctaaatttgtaatattatttgaacatatatggaatcagaagggtatagcacaggactgagtgcggagaagctatggttcattgtaccctagtgtcggtggagaagaactacacaaaagaagactgatcactgttccagctgctagtcaaattcccaaaccagctctccattattggcataaagatcaatggaagaatttctaatatttccagcaatgatcttgaggcttgaactaactctgaattggtagaatcaaaaggcatgagtaaaataaaagatgaacatctgactcatttgtgtgtggctgcaacacaatgcctcacagtctcccgcatgtcaaggcacacatagaaattaattacattcatacaacacttcagtgtggaatgacgctgcttgaaaccagcccatgactccaacttccttgagaactctgcctgccttaagccacgatgagatagagatcttcccacacacacgatcaagaaaaatgtaaatctgtggtgcatggtccttacaaaaatatccctatctttatgaaagctgtatgtaaccaagtaaatatggatgaaaattttcagtgtctttggattctaaaactgatctgaaattgaaaataatgtgtcaaattatgattatttatagagacacaggcatgttcttgtaaattttgttagtttagacacatggaaagagaagagtgagtgaaatataaaaatgttaaataagaaacacagatctctattgattgcagggccccaacctgagcaatcagccacctgctcctgtactgtggctgcacagagctcttgttacctctgatcattgccaccaggtcttctgtgccagtgcagaagcacaaggctggcttttgaaaagaagtttggtgaaacaggcagatgtttcagatcaagctattagagactagcagaaatcagccagaggaagcatacatttttattgttgatttctcacaagttctcaaaaagactatttttcattgaactccagagcttttgtggcttgctgaataacaaactgttgtacaactcacttaagcaagtgccattttactatctcatgatacttctgctccttgtgatgctgactgcagctagggtcctctgggggcttgcctgactagaacccctggagctcacttccatacccggagccttggtgggaatgcggaaggctgggctcatctctcatcccaactattctcagggctttcattacacatggcctctgcatgtggtctctcatcaagatctctctagggcttccaatattacaaaagtggaaggtgccaggcctttttaatgtttaggccagaactgccacaatattatttctactgcattctcatgcatacataagaaccatgaatgtgacattacttggaaaaggggcctctgtaaatataattaaaattgagtcatagagccaacccagagtcaacatagaagggaaatacacaagggcatgaatatcagaagcacgattttgagggcatctttggatactaactcccacaagagctaactaagtaaacatattcctatgccagatagatatcagagtgctaatgaagcataacacatgaccttgataatccagtaattatcaaggtcatgtcaatttgaacttccaaatactgctcgtatctgtttctctatttctatattgcttactgctttcctaatttaggcattcagcacctctcacttggatgattgcaatggcttcctaattgtcttcctgcctctattctcaactctttgaatctaacttctacatggcaactagagttattataaaatgtatctaataagatcacttcctgcctccctttgggtagtaaggaaccactagaagttgaaactctgtattaaaactacaaggccggctgggtgtggtggctcatgtccgtaatcccagcactttgggaggccgaggcaggtggatcacctgaggtcaggagttcgagaccagcctgaacaacatggcgaaaccccgtctctactaaaaatacaaaaatttgccggacgtggtggcatgctcctataatcccagctactcaagaggctgagacaggagaattgcttgaacccaggaggtggaggttgcagtgagctgagattgccactgcacttcagcctgagtgacaaagcaagactccgtctcaaaaagaaacaaacaaacaaacaaacaaaaatacaaggccatctacagaatcctgtttaccttctattttaatcttccatccttctctcatatatgtaatatatatatatttatattatatatatttatatattatatatgtatatttaaattctaaccctttatgtgaatattaagggccttcctaaatctgaccccttttcccagaatatatttttcccattgtaatatgcacacaggtctactcaccctttatggcccaattcaggcattatttattttttatctgagatttcatagaatctcatagaatctgagatttcatagaataacacttgtaacatcttattataaatatttttgaatctgatcctctcttacaattgttttgacaaaaatatttgccactgagagctattatatgtttatattcaatggaaatgtttcctactaggaaatgcagagattcagtctaagagtgcagagatttcttttactccttgaaccaatgcatggccagcttcccttctcttcctttagtaaatttccacttccaaccataagatctagagagaggctacaagacagaccatgctgcgagttgggaaagggcaagcttgacccgggcgagattcctctgtctgggtttatgcctcctacgtaaactgcaccagtactgctgccctggatgaagagaagaggatttctaaagcccccacaggtgctccttgcacactccttgctcttcttgaatggggaaggagtccttattgccttaaaattgttagctttgtcttcattttgagatccaaatccaatattcctacgaaggaaaaaaaagcatcccagtggcatgcatttcaaaagtttatcttaattcacaagatttgccatttttcagcacatccgaaaactgcttcttggtctgtttccatttcatgcagtaattcagatttagattcactttttaccctacacaaaatgttgagatttccgccattaatacatttacaaggcaacactttaaagacattagatttcttgtagtgggttgaatgatgacagaagatatgtccatgtcctaatccctagaaatagtgaatgtggtgttatttgaaaaagggtctttgcaaatgtaattgagttaagaatatcaagttaagatcaccctggattattcaggtaggccttaaatccaatgacaactgttcttttaagaaacacacggatgaggctgggcacattggctcatgcctgtaatcccagcactttgggaggctgaggcgggcgaatcacctgaggtcaggagttcgagactagcctggccaacatggtgaaaccctgtctttactaaaaatacaaaaattagccaggcatggtgatgcacacctgtaatcacagctactcgggaggctgaggcaggagaatcgcttgaacctgggaggtggaggttgctgtgagccactgcactccagcctgggtaacatagtgagactctgtctcaggaaaaaaaaaaaaaaaaaaagaagcacacagatgagaaggccatctaaagacagcggggtagaggttgcaattatgcagccacatccaagggatgcctggagccaccggaggctggaaaagatgaggaaggatcctcccctagaacgttcagagggaacatggccctgctgacaccttaatttcagacttctggcctctaggggtataaagaaaataaatttttgtcaagccaccaagtttgtttgctacggcaaccctaggaaagtagtatctcctaaaggtgatatttctaaatagctacaaccaaaccttgattgtttttatagaagggcacattgtcaaccaataccatttgaatatggtattgatatggttctaatattttaatactttttggaatattttaagtttaaatcgtgacacagtgtatatacaaacacacacttttttttttatcatttaatgaacacctgagtatccacaatttacccgctattagagtaggacatgttggtgaataatagacaaatactttccaatagaaattgattatctgttagataagactttttttctaattatattaatgtcttccctcatcacgctggcatgtgtaaaagtaacatagtgggatggcagacatgatctctaaattggataatttaccagggaaatcagggtgacgaaagagaaatttgtatttcttatcgtctgttttgaggtaatgcgttgtctaacaataaatcacaagtgtctcccacatttattaaaaagtctgtgacctaatatgtcccattaaggcacttataagcatgtgctacatggcacaacatgatgcttagtgacaatggaagcgacaaaatggaactttctcttttcttcggatgccctagttttaaatcacagactccatttttaagaggcaaattattcctccttgaacaatgtcaccatcagtaaactcttttcttccaatccttgacacacatacataccacctaaattagaaagcagctttattaataaaataatctgttgtcaaatcagcaatgtttgagtccaccacaggggggcagcatcggcaaacatagactctcctctgagagggtgggcaaaatagtgtgattggttttctcaacttgcagtcacctctttccctttctttccaaaatgcacacatctactttccaaaatagaccgcaactatttctattgatctggaagaagcttgtaccaggcaacccatttaggagaagttggatgaagagggagagggagatgctactcatcacatcaatgttggtcttatggatgcaattgtcacgtgagtttgagacgtccctgactgcttccagagaataaatccaacaggatagagaagtatctgcaggcagggaatggactttctgtttgagaaacaagagttaagacaaagggagagaaacagagagaaagagacagaatggataaagcttgagggagatgggaagggagacgtggacagaaaggggaaaaaagaaaagaggagtgagagagacctgcgtagctcaggagctaaatatctaatctgattttatgtgatgcttcccattgtctttctaaacagaggtgaatggacaacaggtaatgcaaattcctcagtaccagcatgtacaagaaggagaggacttcaccacgtactgcaattcctcaactactttaagcaatatacagtggtataagcaaaggcctggtggacatcccgtttttttgatacagttagtgaagagtggagaagtgaagaagcagaaaagactgacatttcagtttggagaagcaaaaaagaacagctccctgcacatcacagccacccagactacagatgtaggaacctacttctgtgcagggcacagtgctccccaagcacctgctgcctgtctccaaatcttgccctgggtcttcaggagcagatcatcctactctccccaaagagcgggcgccagagaaagccaaagtcacaatgtctgtgaggatctcgagcaactcctccccatggcagtaggaatgcatgtagaaattcactctgttaagacctggaagagtttagcagttttagttcctaaaacttaactaccggttttcttctacacaggtgtctcaaagaattctaattgtcttaggaagaatcggtggattttaacaaattgtgatacagatatttatataaaaagtcatctttcagtgcagtggtccccaacatttttggcatcagggaccggttttgttgaagacaatttttccacggagagggtggggtgatggtttcgggatgaaactgtttacctcagattatcaggaattagttagattatcttaaggagcgagcagcctagatccctcgcatgcgcggttcgcaatagggttcgggctcctatgagaatctaatgccactgctgatctcacaggaggcggagctctggcagtaatgctcacctgccgctcacttcctgctctgcggccaggttcctaacaggccacagaatggtacagattccctgccgccaggggtttgggacccctgtttgggtggtagcagaggtttccaagcagtttctttaaggttttagctcaattgtattgcggaagatttgaaaattaaacatttttcattatgtacacaaaacttaaaagaagtttacgaccaactccctgaagagtcacctctgtagaactcatctgcttcaatgcaacgcagtccaacatagcataaagattatgcaggcggtaaccacctttccagagaactgagtgaaaagagctctttttaaaatgaggagtttagacgaaactggaaggtgacccatgaagagatttaggcatggtctctttttcactcttccaactgcaattatattcgccaagcccagatgaagctgatgattcaagttccgttagccatgttcattggtctaactacggggaaaagtcagccatagatttcaaagtgtgttcactgacttgaccaattactttatttctcagtacttacaaagatttttatcttgggaaagagaggataaaaatacaactgtattggagagtttaaacattaaaatcaactgagattggtcagctaaatggtcaaataaagtttttgcacctttttaataaaaagttttgtagccataaaattattgtgatgaaaattttgtaacataggaattaagttaatttatcaaatgaacaaagtcaaatacaaaatagtactatgccacttataaaacaaaataatatatgtatatagaaaaatatggatgggaacacacgcatgtttaggttaatttctaagagcaccgtaattatttagtagttgttttcatccattataacatttccaaggctatttcagagttgtgccaaaaacagttatgttaaaattattgtaaaaattattttctcctcttctgtcatagccttggcccttttgcacacggatcctctcaaactgacctttttttcgggggaggggaggggaaggtgggtctttctcccacaaagttttccttcctttctctttttttctttcatacgttttctgtgtttttctgctacaatcatgccaaagtacaaaataatactaattaacaaaatcacaagcactagaaaacagacatgaattataaaaggcctcataaataattctggaaagatcaaaaagtgacctttacagccagtaggggagtgatttcatccatcaaaacagctgccagagatgattcacatcagaagtaaaaaaacaaaaaacaaaaaacaaaaaccacaaacaccaccttaccagtataattaggatctcgttttgattctttaccaaatttaaggagagtatggtctgatatttcttggtttccctcactgattgtttctcttttcttcccagtgtatcttttattaagcacacatgaggggctgtcatcctttgattctccaatattttctgtctgggagaccccatgtacagaaacaaggggtggactgacagtttcaatttgactctagtgtcaaattgaagtgtttggctacttcctccaaaatctttcttcataggattttttttttgaaggttttctcaaagactacacctaactactgtacaaaaacacatcagtagagtctgcttaaaagacctccttcaaggtttcagtgagcatagatcgcaccactgcactccagcctgggtgacagagtgagactccatctcaaaatataaaatgaaataaaataaaaataaaaataaaaataaaataaaagacctccttcagaaggcattaatcatgtctttcttcctttttatctctctttctttccttccttccttccttcctttcttttttttctttctttttttttgtcacatccaatctgtatctccatgctgtctagagtgattagagtgattctctatcctttacagcaatggggcgcattagtccacatctctgtttttcttgctcactcacaggagataagattaaaaacaggtaaggataatattgttttatgaagcaggtattataatttcaaacttataaagaaagaaattgaaacctcaagatattaagtaacttacatctactcacttataagaatggataaagttcaaatatatgagaatatcagtactggttaggctacacatcagctggaactctcatacattgctgataggaaagagaaatgatcagcactttgtaaaacaggttggcagttcttacaaagttaaacttcacttacaatatgattcatcaatccctctcctacgtatttagccaagagaaataaaagttatgttcgcataaaaatttccatgtgaatgtttacagaagcttaattcataattactaaaacctgggaacgatcagatgtccttcacctggagaatggttaaacacattgtggttcatccatatgattgagtactactcagcaacaaaaagaaatgaaatattgactcatgcaacaacatggatgaatcttcaacgtgtcttggtaaataaaagaaactaagtctaaaggactacatattgtgtgagtttatttatattattaatacatatgggtagaagcaaaactataaagataggaaacagatcaaagggttggtgagaactgtaccatagacctgtataccgcaaaaagtaaatcttactgtgtataaattttttaataattagaatgtgagtggaaccccaaaagaaatagaaagtgtaacaaatgcttccaacaatattatagtgaataatgtaaacacagtgacactgtctttaatgtggaagaaaataactaacctaaataatttttgaaaacagtattttgaatagatattgtaagactaaaggcaaaagaatggcacacaaataccattctgtagttaataaatttgtttctcaaggggtataggctagcaattcttaaagtaatttatgtgagcatttggattgaacaaatgtgtataagtaaaatatataatagatcatagatcatgagagccagatttctcactgttgggaaaagtaataaataatgaagggagaaatctatgcagacccagtggagttgaactcatatttttttaaacattcatacatataggttgatacataaataaaattattaggagacttgagtgctttctgatgcccaacagcaaaggacaagcctgtggttactttattcaaattgattcaaaagcctgaaagactttcagcaaagtagataagaaatgtctgggaaacctaggtggtcttaatattaggaaagataacagaatttgtgttgtcaccatatttagttctgtcagcgtatctctttggtttttgtattgaggtataatatgcatatagtaaagtgcatgaacattcatcaaatgtttgtgaacgttttagttatgcacatacctgtgtaataatcctccaccaatcaagatgcagaatatttccaccaacccagaaattatttcattcctcttttcaatcaatacccacctctagagataaccactattttgatttctattgccttagattagttttgctttctcttgaatttcatattaatgaaatcatgcattacattttatatgtttcttatgttgaatactgttccattgtatgaatatgtcatcttgtttatctacttctctggtaatagaaatttgtgttgtttccagtttggggctatgatgaatacaactgctataaatgttcttatgtaagtctttttgtggacatgtgaaattgttgaaccttcttatataacttttattgttgtagtagaatctctgggtcataggacaggcgtatctttaaccttattagaaacttccaaggcatttttgaggttatatcattatggaaaggagtttcaattctccataaccttgctagtacttaatattgttgacatgtatttttaaactttttaattttgagattattataaattcacatatattttaaaaaattaagacagatcatatgtatcctttactcagtttactccagtggtgtaaaactatagtacaatatcacaaccaggatattgacgttgactcagtcaaggcacagaacatttctatcaccgcgaggatgctttctattgtccttttgtagccatattcatttcctctctgctcccatcccctccttcatccctaggaactattaatctgtccttcatttgtataattttgtaattccatatatgttatataaatgacctttggggattgactttttaaactcagcataccgctgtattttgtgtcttgccaaactcgagaagtttttggcttttacttctttgatactttttcagccttgccccttttcctttttagtgctctgatgaaaggaatgttagatattttgttatagtcctgcaattccctgaggcttggttcatttttttaatcattctattttccctttgttattcagattgagtaatttcttctgttctaccttccagttcactaataattttctctgtccactccattttgctattgagcccatctggtggactttttatttcagctacatttttaagttctaaaatttccattttatatcttggttcttttttatgtatcttacttctttgctgagatttctatttccacctgaagctttctgtttctttatttgtttccagcatgtctgtagttgcccttcgaaacattttcatcatggctgctttaatatctttgtcaggtaattttaccatcgctttcatctcagggttggcatctattgatcgtctctttaaaattctgtttgagatcttcttggttctgagtatattgagtgattttttttattgaaatctgaacatttgagtattgtgtttgaaactctggatcttatttaaaatttttgtttttcctccttttctctgatgccactccagcaggggaaggggaacaccgccttactacctggtagagatagaatccagggtccccattcaacctcattgacatcagagggcagggaggatcgtcaaactgccaggtgggggttggacttctgggtccctatgtacagatgagtcttgaaaaacatgagggtttggggcaccaacccccaagcattcaaaaatttgtatacaacttttggctcccccaaaacttaactactgatagcctactgttgactagaagccttactgataacataaaaaatcaattaacacatattttatatgttatatgtactatataccacattcttacaataaagtaaactagagaaaagtaaatgattttaagagaatcataagaaagaaaaaaatatgtttacagtaccatactgtatatagcagttctgtaagtttatgtagtctgttcacaagatgaatcatctgtctgaaattgcaggcaactccaattgcagctgcagcttaatatcaagcaataaagttttttcttgtaaggtcatgacttttctctgcttcttgggcgcacttccagcatcactagtggaattttgtatggattccatggtgttattcaaggtttacactattgcactaaacacagcgaaaagtgtgggagatcggtgagagatgactttttactgcaatgcgcaaatggctagagagatgaactgctcatgtggagagaattagcattgcattttaagtaggtattcacaaacttgagctcactgcaacagcaacagaaggtggctacaaaattattacagtagtatagtatgtactatagttaattttgtgcagttgtgatttaatactgcatctttaagtttgtttgcatttctctggactccaagtgccgccacatacactctgtgtttatgtgcttaagttttgatacatttaaaatttttataataaatttgtgtatgttttatggtagtaagtgataaaatagactagtatttacatgcattttacacattcatgacatatctttttcttaattttattgatatttttagactacgttgtgtgtttgcaagtttttttcaactttttgcaaatctcaaaaaatttttccaatatatttattgaaaaaaagttcacatataggtggacccatacaggtcaaacttgttcaagggtcaactgtagtctccactgtaatttatttttcttcctttatggttagggttttttgtgcacttttaaagatattgctgtccacttctaatataatacagttgttctcctgtgtcttcttttaaaactttatagcttcacccttcacatttagatgtctgacccatctggaatgtgtgtgtgtgtgtgtgtgtgtctgtgtctgtgtgtgtgtgtgtctgtgtgtgtctgtgtgtgtgtgtatatatatgattaaacaattactttggcatctatattgaaaagaccatttcttccccactgaattgcattggcacctttggagaaaatcaagtgattacatatgtgttcatctatttctgggcatgattctgttaaatcatctttttaacaattctcataccaatagaccattttctcttaattattgaagtttcacataagtcttgaaatctggaaatgcaattcctccaactatcccccacctttttcttcaagattgtctagcttgctataggatttaaatttccatagaaattgcaaaacagattctcaaacttctaccacaacaaatttctagtaatttgattcaaatttgctgagtttatgatcaggttgagaaaattgataatttaaatatggattccttagatttataaatatagctcttcatttatttaggtcctctctaattccttttattaatgttttataattttcattttaatgaactttcatatccttaattaaattcattcatttatttcattgtaaatggcatttttattttattttccaattgtttttagctagaatctagaaatacaatggaattttttattcaatgactgtgcaattcatccattagttctagtagtttctttacagatccttttaaatttttttatattcaaattatgttatctatgcagaagaagaattttacttattcctttcccaaatgtatgcattttattttctttcctgacttgatgccagttattccaatgcgataataaatggaagtgtgataatgtatcttgttcctaacctcagagaaaaaatgtttagtattttaccattaattacaatgttagccttggatatttttatagataccttttatcagattaaggactcttttctacatttctagattgttgagagtattcatcatgtgagggtattggccttgtatcaaattctcttgtgtgtgtaagttttgataaatttaaacttttaataatagatttgtatatattttatggtggtaaatcataaagaagttaaaataagttgaactcattattttggtttttcatcaagcaaaggaggagaaaaccttacccattatgatcttagagatcatgtaatcttctaaaatgtaagatactctgcgaatactcagtagattggacaaatacattttttattctttagagctatgcaaaatacttaatgatttttcaataccattaaaaaatcacctgttagtggcctcaattgtcttccaaaaaataaaggcgaacaaaccaaaagcaaaaaaggaaattgcattaattacttttcttctgcctttgttaatgtaacaacatgatatagtcctccctactttcagtaattgtttgtttcttcttatattttcggcagtactgtcctgttaacttacatctttgtgatctggtacagagtaggctcttagtgaatattttttaaatgaatggaatattattactatgacttttactctatatctttgtagcttgatttttcacacccgtgttggggaaatttattgtctatcattgaatttttgcctacaaatctgaccctgtgtttaccccattgtagtcttttgttcaaaatctattccagaaaactgaaagagtgcacagacaataatttaaagatttgctcagcataagttctctcagtaaatttgtcagttatgactcatctacgcattcatgaaacaagtaattattgagtgcttattctgtgccaatatctcttttttttttttttcttttgagacagagtcttgctctgtcgcccaggctggagtgcaatggcacaatctcagctcactgcaacctccgcctcccgggttcaagcaattctcctgcctcagcctcccaagtagctgggacaacaggcacttgccaccatgcccggctaattttttgtatttttagtagagacagggtttcaccgtgttagccaggatggtctcaatctcctgacctcatgatccgcccgcctcggcctcccaaagtgctgggattacaggcgtgagccaccatgcccggccgccaatatctcttataaacattgaatagtatgggcttttgaactagcctttaattatgggaatattagaaacaaaagaaaaattaactccaagtcagcaattgagaattataatgggaatattattgaaataacaaagtaatttaaaaaatagttaaaacctttcttggagtgttagaggactgataaaacaaagatgagtacagaggtattaaaactaagatacctaccttcaaacctgataaaagagtcagaagattgctggctgactttttgcctgattatagctacacagttcattcagtcagtcagtcacaagagggggctgcttcaccttaaaactcaggtttctttcttgcagaagggacgctaagcttatgttttccactaaagttccacagaaaacaggaaaaaaaatgatacacttttatcctctttagacaaattgtactttatgatctcttattaagtgtgttatggcttcaaaagttctggggcccttacactgatggactaagtcttttcagagcacctcccttaacactgctttctccaagttacacttccctaatcatctcttacctcccctattccttacacctttttcttcctttcctttacctattcttaccaccatcaccccaaacttctttgcttttcctggtctcttttctttccgcctcagtgtccttggtgcacacagtaggcataagcacgggcatagaaattaggaaatgaacatgaaggccatgagtttaaggaggatgagagccagcaccatttatgtcattagtcactatatcaagaacagatatattgagaaatggctacttagacaacagtcaacacatgattccagggacctctatagaaaacccgagtttggggagacttagctttcagtgtcaatgttatcaatttttattttccccctgagcacatcacttcctacttttgaacttcacttccattttctagaatgtagatgggaatttccaactccttacaacacagagctcactataggcttctgggatttaatgacactttccacaagctccatggagcagaggaaactttatttggtacattgaggaagaaatgatggaagaaaaggtctggatagatacatccttatgatcagttttcctcattctgtgccagcctcttagactttaaacctcataaatgatttcagtagacaccccctgagttgaggatgtctggttgatatcctcaccgtcttctcaggaacatgactaaacctggggaggaagacatagaaaagcaactgctctatcattggctgacaagatcctgacaacaacacaatgagagctgcactccttgcaagtctttactagtagctgttgcttctgttctctggaaattctttaaacctagaatcagacacaaaaactgaactctgggtccacaatcctcatttgtccttgaagtatgaggctggtggcaagagtaactgtgtttctgacctttggtaagtgctctgtgtctacctagggagggcttctgaggacaagggaccccgaagggtggtttgccctctatgctccctgtgctttatccagcatactagatatgactgagaactgttctgtgcatttgtctaggaagtacatacatctacataccaggctagatcataaccataatcccagaagagcccttggcagtattcagttttaagaaatctatgggtttactaaatcaagctcccatggaatacagcctagagggtctctgattattggcatgtatctttggtctttataattaacagcaatgatattttttgtgttcttgcaggacataaaagttttggagtgttaagggagtgttgtatccttgatccatagaattgcattggtttgagagtcaggagctaatctgattttcttgaccccttaggaactataattgatgctaagaccacccagcccccctccatggattgcgctgaaggaagagctgcaaacctgccttgtaatcactctaccatcagtggaaatgagtatgtgtattggtatcgacagattcactcccaggggccacagtatatcattcatggtctaaaaaacaatgaaaccaatgaaatggcctctctgatcatcacagaagacagaaagtccagcaccttgatcctgccccacgctacgctgagagacactgctgtgtactattgcatcgtcagagtcgcacactgggacagatggggctgcacctgtgcaatatctccctggtggcaagtgaggaggagggtagcattcacctagagcaaaatgtcgataggagtcaaaaagtaacaagaaaagaggaaaaggaagggaaggagagaaggaggaaaataggtaaagtaaataagggagatacgatgaagggtaaaaagataagaataagaactttattgttgatgcggctgagaaaaatgataaagaggctgtgaatcataatttgaacatagcaataaaatgaagagggttaagaattttcaagactcttcttcatgtcaaaaaaaaatcatttcagtttgttagtaaaaatgaatggataaggaaaatcaaaataattctgcttgtcccaaaggcttttttcgtctggatccaggggcaagtccaagctttgaaatgcatgctgttatagttgttccaattaccagaaacaagttgatgtttctgcaagaaaaatctgaaatgttctttcttactagtgcagtaacatcagttactagagcatgcatatttgtgatgaaggtttttctttttggaaagaaacaaaaatcaaatgaatattaatttgtttttatttttcttgaagtcttgaatctttaaatagtcttcatcacgttttatttcctaagcagcacacaaatccatcttaccataaaagactcagataaagcaaaagtgaaagacctagctgcatttcctcattcttccctatctcacaccactcttttcaaagaacactagctttgacagtttaaggtataccatgatagccagtttaatttcagttatctatgtttgcatataactttatgcaatcacacacaaacttacatacatacacacagttttgtcatgtaaattggatttattagattttttaacttgccatttatttttcatttaataaattgtcctagagatctttctatatcaatagagaagttcactttattctttttggtgcttatttagtactttgagacattccatcatataattgcttttctcttgatgcatatttgttcctattgcctcactgtcataaagaacattgtgttctacatctttacagattcaccttagtttgtgtgtatgtggaagtgtttattttaatgagatttctgaaactgaaattactatgtcaaagggaaggtgcatttaaaatttttggagaaagtggcaatttgccctccaaatgatgtaactacactccatataatacatatatatgtattattatacacataatgtatccattataactattatataattaataaatataatacatataatgtgttaaatagcttccaaccaacagtaggtgaaagaactcattttacatttttataaaaattgaattgagaattactaacggcttttatttttattttacttaattattctatttatttattttgagtctgggtctcactcttgtcacccaggctggagtgcagtggccggatctcggttcactgcaaccttcacctccaaaactcaagcaatcctcccacctcagcctcctgactagctgggactacaggtacacaccatcactcctggctactttttgtagagacaggatcttgccatgttgcccagtctggtctcaaactcctgagctcaagagatctgccagccttggcctctcagagtgctgggattataggtgtgagccaccgcacccagcccagtttttaataatccaaagatatattatctttagtcattttcctgattcatagtgtttttgagcaacttttttctacatgtattggcactttttcatttggcaatatgcttattcctaccttttgaatatttttctatttagttgtcctcttttctctttttattcgtaagaattagtttcatgccttaaataatacattatttgtatgaatattttattctaacattacctttttattgcttatttctaatataattttaaatttttacatattttaacctatcaagtattcctttcctttaggccttgaaggtcaatatctttacaggaaatccctaagtatatcacatattttaatatttattaccatttggttgagaattattttgagatgtatgttacagattagaaaactgagtctcaaagagatttaaaaacctgctaatattcacagtattaataagtgagcatcaactttaaatttatttttaaacctgagattgtctaacactaaaatctgaacacacattgtttaacctcatcttactggaagcaatcataagaagaaaaccccaaaataatgaatcaaataaagcatcagtggaatggattatagtagccatctaagacacatgttagagcaaaaggtccggaatgttagggtagaaattgcgagttatgagttgagaaagtcaatggtccttaatcttatagaaaggtaatgttagtaccccaaacattcaaatagcagccaaaatgggtgttttgattgtggaagaactctaacgcatcctcagctctttattagccatatgtgttcccaggcagaatggatattgaagaaattagaacataaagcaaaggaagtaggaaagaggagtttgatcctggatctgagtggcttccaattattcttggaaacttcacacagattgaggaatttttctggtccatagaatgggtagataaatgtaaattactatgatgatcatacttggaaattgctttgattccatgagtgaaagataagggaacagatatctacacacaaatcttagaaagtgcactgagatgtgctggtagcagtttccaaagattgacatatcactttcaacgtccttacagtcactttattcacactccttttctctttcacacagtctttaatctcatttaccttttgtttaacaccatcctctactctcctgtatttgaacacacaaatgtttgaggcctgtatttttggtttttattcactgaagcatcctctgtatctaggacagtgcctggcaaatagtaagtactcagaaaatatttactgaacaaatatatttatttataattgaaaatttttactggcaaatactaaggatgcaataaaatactagggacatgagttagattcgctatgaggatacatgagccattcagtgagaagcccgaactcatcaactttaaagaccattaatttgaatcccctttagccattaactcccatagccaccatctagacaggtcttatgataatgttctgctccacctctgaaatcttacctgcagtctaaaacctcccgccctgagattctcaccctcagttactctcactgtacttgttctttgactatatttggttatttaatcccttgacacctttcttttcttttttttttttatttaacttttgttttaagttcaggggtatcgaacttaaaataggtttgttatacaggtaaacttgtgtaggtttgttatataggtaattctgtgtcatgggggtttcttatacagattattttgtcatccaggcattaaacctagtacttatttgttatttttcctgatcctattcctgctcccaccctccaccctcaagtaggccccagtgtgtgtttttccctctttgtgtccatgagttctcatcacttcattcccacttataaaagagaatgtgcagtatttggttttctgttcctgtgttagtttgctgagaataatggcctccagttccacccatgttcctgtaaaggacataatctcatttctttttatggctgtgtaggattccatggtgtatatattaccacattttctttatccagtctttgatgggcatttaggtcgattccatgtctttgctattgtgaacagtgctgcactgaacatacacatccatgtgtctttatgatagaatgacttatattcctttgagtatatacccagaaatggtattgctgggtcaaatggtatttctgtttttcaatcttcaaggaattggcatactgtcttccacagtggttgaactaatttacattcccaccaacagtatataagtgttcctttttctctgcaacattgctagcatctgttgttttttgactttttactcatagccattctgactggtgtgagatggaatctctttgtggttttattttgcatttctctaacgatcagtgaagttgagatttttttcgtattattgttgactgcatgtataagacatacatgtaagacatacatgcagccaacaataataacttcttttgaaaagtgtctgttcgtgtcctttgctcactttttgttggggttttttcttcttgtaaatttgtttaagttccttatagatgctgaatattagacttttgtctgatgcatagttcgcaaaaattttcttccattctgtaggttgtctgttcactctgtagatagtttcttttgctgtttagaagctgtttagtttaattagatcccatttgtcaatttttgcttttgttgcaattgcatttagtgtcttcgtcatgaaatttttgcccatttctatgtccagaatggtattgctaagttgtcttctaaggtttttatacttttgggttttacatttaagtctttaatccatcttgacttagtttttgtagacagtgtaaggaaggggtcccatttcaatcttctgatttgtctagtcagttatcccaacaccatttgttgaatagggaatcctttccccattgcttgtttttgtcagctttgtcaaagatcagatagttgtagatgggcagccttattcctgagttccctattctgttccattggtctatgtatatatttttgtaccagtgccatgctgttttggttactgtagccttgtagtaacctatagtttgaaggtggggcatatgatgcctccagctttgttcccctttattttcaccttatttctcagaagcttcttatcttttattttcttacctataatgcttatactctattacctgttgctttcaatctttagtcattgactatattattctcatcccaattctgcatcatagcagtgatctaattaattcccaatcatgaatctgtgtcttccttattgtaatgcatatcttgtctgatcagagtacaccgatgcgcagattggtgtcattaaaacatactgttaccagccgggagcaggggctcatgcctgtaatcccagcactttgggaggccaaggtgggtggatcacttgaggccaggaatttgagaccagccaggccaacacagcaaaaccctgtctctactaaaaatacaaaaaaattagccgggcatggtggcacacatctgtaatcccagctattcgggaggctgaggcaggagaattgcttgaacctggaagacaaggttgcagtgagctgagatcatgccactgcactccagcctagacaacacagtgtgactctgtctcaaataaataaataaataaataaataaataaataaataaatgttgttaccttcaaaattaactaggcccacaatgtttccaggaaagtattcttcttctctgtaatcacatctcactgccattttctaaaacttctcacatacctcagacttcctaacccagatcctcctccattcactctcttgggagacatttaatctctgtgtataacaagaaaaaagatcccattagaaggtaataggtgtttcactttctaccttcacactccaaagtatcacttaaatctaaactactgtaatccttttctccttcatttcaataaaattgaaaataactgtttttcctcctaccaaaactttgtccttctacccataatccacattccaatcccatctgtctcctcaaaactttgatccattgtttatacattctttccaaaagcatgtaaatataccctaatttgtataaaccctaccattacctcttcaacatcctcatccagttaacaccatgactcttttctcctctttagaggatccagcaacctctagaaggagatttctatattcaaattttttcttccttgtctcatcacaatgcctcttcccacagcagttgaccttttgctgaaaagaccaaaatcatgatttttgtgttgttaaaaaaatcagtagttcaatagcacagtatggtgactatagttatcaataatttattgtatatttcaaaatagctagatttggaatgttgtcaacacaaggaaataataaatgtttgaagcaatggttaactcaattaccatgatttgataattacatgttgtatgtatgtatcaaaatgtcacatgcatttcataaatatgtacaattattacgcatcaataaaaaatcaatagacatcgaaaagttatcatcttatagacatttatttaccactcactctgttagccattcatttctttttagaattccttttccttctcttttagaaatccagccatttctgatttgccacttacctccctggataccctttgaggtttccttttctttttctttttttttttctgagatggagtctcactctgtcacccaggctggagtgcagtggcacgatgttggctcactacaacctccgcctcccagattcaagcgattctcatatcccagcctcccaagtaactgggactataggcacaagccactatgcccagctaattatttgtatttttagtagagatgggatttctccatgttgaccaggctggtcttgacttcctggcctcagatgatcttcccgcctcagcctcccaaagggctggaattacaggcttgagccactacgcccagcttcaaggtttctttagtactttttccattatctatcccttcagtgtttgggttccttgaggatttttttaagtccctattctcttctaaattttgctctaagcatttgtctcggtaaaattgcatctagtcttatagggtagtactacgtcacagataacatagtgggcaaggaactgagcttgcagtggaaaagaattggattctaatccttgcatgtccttggacaaattatttaacttcataaggacttgatttcccatctgttcagtatagataagatctactgtaaagggttatagtgtaaaatgtgcaatagttatcagtggtcaataatgtggattattaaatcatattgatgagacaaactccaattctgttgatatagcagatcagccagacttgttttctgagcactggtcacaagaccctgctgaacaaaacaggagctgatcaaaacagaatgcagcaaagagagtggccaaaaccagctaaaaccaagatggagatgaaagtgacctctgattggccccactgctcattatacactaattataatacatttgcatgctaagtgaaactcccaccaccaccatgacagtttacaaatgccatgacaatccccagaagttaccttatatggcttaaaaggggaggaaccctcagtttagggttccttttccaggtaattcatgaatttatttattatttagaatataataaaaaaatagccatatatatagctagccaacaatccacaagggctgtaactgctgctgctattactctgtctatggagcaaccactttcctgtactctgtagctccaatacacttgccttcactttgctctgtcagctcactcatgaattctttcctgtgtgaagccaggaaacctgctgggctggttttggggatcacctacatcactatcacttactatgacttggacaaattgaatcttttcttccatgctttagtttccccgtttataaaatgacgatgataatagtatttacttcataggattaaataatattatttactttataagattaaaatagcttcctcataagcagacccctgaaaacactgtcatcagattattctgctaagaaattcaaaccaaggaaatggagcccaaacccaaaagactcagtgtgtttccacatttgacctccagggggcaatgtctcacagaccggaaatgtctctgctaagaagagttctgtccttcctgagcggctttatctcacagctcactgaggtccatattctgagtaggatcaacaccagagtggttgttgtcaagagagcagctcttactagtggtctctaggccttacctaagcagggaactcttgaatcccagattttcctcattatagggactcaccatcctctggcacattccttcccactcaggagatcttctagaatagagctctcagcttcctcactgcctagccatgctcttagtggtcattctgctgcttggaatgttcttcacactgagtaagtataataatattgtttccctgctcccgtctccatacaaggaacattgttccaatcggaatctaaatagagactctgtctcattacaggtagatctgttctggtctcactaacagagtgttgatgttgcaggaggaaccagaacccagtcggtgacccagcttgatggccacatcactgtctctgaagaagcccctctggaactgaagtgcaactattcctatagtggagttccttctctcttctggtatgtccaatactctagccaaagcctccagcttctcctcaaagacctaacagaggccacccaggttaaaggcatcagaggttttgaggctgaatttaagaagagcgaaacctccttctacctgaggaaaccatcaacccatgtgagtgatgctgctgagtacttctgtgctgtgggtgacaggaggactgtgcctgggactgcaggaggagctgaacacaaacttcctgagacactgaggttttcaggaactcaagggcacagcctgacctatttgtagcaaggtctctcatttgatgaaagtgagaaaggtggaagaacagagccatgaggagtgcttgactccagagaagaaacagagacttcaacacgttccttcttttactactgggtcacatcagacaagatgtagaagagacagacttctatgactgttctccttctgcttggaaataccacactgaagagggtcaagttttttttttattatactttaagttttagggtacatgtgcaagattttaaattagtgtgaccagtactggactcctgatcctctccttctcactgccaacatgctgcttctattaccttttgtttttcaatcgacagcatctcattctttcagaatctctgcccgtagcctcagagttatttttgactcttattttttctttcactattcacattgaatccatcaagaaattcagttggccctaactaaaagatcgacccatagtttgaccactgctatctctttggtcaagccaccctcatctcaatgaattaccgtagtagccttccaaatggtttccctgcttgtcctcctacagaacattcttaatacagcagccaatgagatctttcaaatatagataggtcactcatctactccaatccttgcaatagcttcccatttctcttagagtaacatcaaagtacttacagtgacctataggaatgcatgatctatctctcgttacatttttaaaacaccaacagaaaaataactttggcaaccctgaattctataccaataaaaatatcacaaagaaattatagtaaagacattctcgaaaggaaaactgagagaattcgttgtgagcagacctgctataaatgaagtcctaaaggaagttattcaggctgaagggaaaggataccagaggaaaatttgcaacttcaaatacgaaggaagaacaacagaaatagtaaatagatgataagatacaagaaactagtttccatttctcttttacagtcagctttactgaggtataagttatatacaaaaactatacatatttaatatatgcaatttgatgagtttggacatatgcatacaaccgtgaaaccatcatcacaatcaaggcaatagacatgtttgtcatctctaaaagtttccttgtgactctttgtttttgttgttattgctgctgctattgttgtaagaaaaattaacatgagatttaccctcaataaattttcaagtgctcaagcctgtattgttaactatggacactatgttgtatagcagatctttagaacttatttttacataactaaaactttaaaaccattgaacaacaactcccaatttctccctccccccagtccctggaaaccattattttattctctgcttctatgaatttgactattttagatacctcaaataagtgtaatcatgcattatttgttcatctgtgactgggttatttcacctagcataatctcctccaagttcaatcgtgttgtcacaaatggcaggatattcttctttttcaaggccgagtaatgtttaattgtatgaatataccacaatttatttatttatttgtcactaatctttcttttccatatcttgcatattgtaataccacatgcagaagaataaaattgaacaccatacgcaaaaacttactcaaaattaattaaagacttaaacatgatacctgaaagtgtgaaactactagacgaacacgtagagaaaaagcttcataatattggacatgacagtgatttcttgggcatgacaccaaaagcacagacaacaaaagcaaaaaaagacccatgatattacatcaaactaaaaagcttctgtgcagcaatggagcaatttatggaaagggagaaatatttgcaaaccatatattgataagtggctaatatacaaaatatgcaaggaaccataaaactcagtaacaaaaaaaaacaagtttaaaatgggcaaaagactcaaatagacatttctcccaagaagacagacaaatagtgaacaagtatatgaaaaggtattcagtatcactaatcatcagggaaatgcaaatcaaaaccacaatgagatatcacctcacaaatgttaagatgaccattattttttaaaaagttaagtataggtgaggctgtggcaaaactgaaatccttgtacagtgttcttgggaatgtaaaatggtgtagctgctatagaaaacattatggagttcctcaaaaaattttaaatagaactaccatataatccccaaaccctacctctgggtatatatccaagataattgaaatcaggatctcaaatagatatctgtattcccatgttaatttaagcattatacacaataatttctcttcttaatttatttaaaatgcatagactgttgaaataaaatgttataaaattccccgttggggttttcaaagtctaaagatggaaggcatctgagaactataacatgaagaaatgagggtaaagtaacctatatacaatttctatattgttcatgaagcagtataaataaatataaacagactgtgaaagattaagtagtaagcatagtagtagtaggcaatcctaatagaaaccactaaaaacataatacaaaaagaaatagtcaaaaatcaaatagatacattataacagaataataagagaccaaaacaaagggcagaagtggaaaatgaatactgaagtaatagacttaaatacaaccatattaatagttacattaaatgtaaatggtctaaacacagatatttaaagacagagattatcagtatggatttttttcttaaagaagacccatctacatatgaactgactttaaatacaatgacaaagattaaaagtaaaagaatggaaaaagagatccatgaaaacactaatcaaaagaaatctggaagggctatattaacatcagacaaatgggacttcagaaaaagaaatattaaagaaataaagtgaaatattacataattataaaagggttgcttcactaaaaaaatgtttaaagtgcttgtacctaccaacaaagcttcaaaatatttgaagctaaaatggttagaactaaaagaaaaatagacaaaaccgctattacacttggagacttaaaccctttgtgttcagtaaataatagaacaagtgttatagttagagaatcagcaaagatgcagcagacctgctcaacactattatattgacatttatggaacactccagtaaacaacagaaagaacataaagccatgcttagaagaaaatttataacagtaaacatttacattagaaaaagaaaaaaggctcaaatcaataattttatttcttccttctgtgtatccccagtgatgaatgtcctgcacagaaaaaagtaatcctagcaatccaagaaactctgtttttgagttcaggcaaagaagagtattttctgctgttactgcaccaggtacccaactggaaaatgatatgtctcatattttatattgctctcctatgctcaaagattaaaatgagattaattctatttatatcacatgtcacagttctggaggaggttatgagccttcctattatagtaatgatatcagaaagggtacaagataagtttagtccttcatcttttaaaaaaatatatcagttatgaagattgttcgccacgaaatgaattccgttatatacattataaattatataggacattatagggtaccttacaatacatctgcgtattttcacacaaggtgagatatcactaattattaaatggaactatgccactatgtttttccttagcttttcaagggataagcacaagaatattcaagttatgcagtgggtcaagcctaagaacaaatgggaaagctgatagaataaagaaagactcaggctaggttctggactagctgggactaacatataataagtccataagtgcagaatgaactggatgtgaggagtgtgtaacccttctccatttcaacgtgcccaccttttgctttatttttcgctgaatgcctctcaatataacaatgtaacaacacactgacatgtcatttaagtgtcagaagcattatgggacatgatagagggaacaatcagcttttctgtgtcctatttgatctttgacagtataaaaatctgacttttttcctgtgggcaggtatagagggcgtatatgataattttgtgtactttctgctcaatttttctgtaaacataaaactgctctaaaatagtctattaactttgaaaaatcaattttagtatagaagctaaaaagaaaaaagaaaaatcaatccaatgcgctcaatctcatagaaaatatttgctacaaccagttcggattatttcttactttcctgccttgtgtactctcttcaactttttgtgttggtgcttctttggtttgtgtatttactatgcagcatgcattatgtaaagttttgcatatattatataatttaagtatactaacataaaagtagaaataacttctgttaggaaaagaaatataataagtaatttaaaagaaaaagtttatggattggatagggtgtgtagaactctcaactctgtcattatttgaattatagtagaaacgttaacaaacatcttaaatttcaattttatcatctgcttacaggagatcatcatgatcatcctgtcagcagttgttccaattatcgaataataaaatatctttcaagggcttagctcatattctagcacaatgtaaacatttaataaattattataggtaaagaaatggaggcccagaaaacataactaattttgctcataatcagaaacctagtgcattagagaaagaacactgagttttgaaatcctagctataaaatttaagccaaatatcttcaacttatgatatcactgatctattctcttgaatacatatattggaagtaaaagatgagcagctagagaaaagtagaggaaaagagagaaaccaggggaagcactttgaaaccaccaaacatgtattatctcttcagatattcaatcacacagataggcatactccttgatggccatttgtactagggctgcaggacttgataaaagagaacctacaacaacattctgtaaccttcaattgatttgttgccctagatctggtccgcatctctctacaaggttataaatgtaatgttgttttcagctgtttttccttgtattaatgaaatggaaaatcctttctcttctgtcctgacacagccctgattattaactggagtcacaatatttttctttctattgttatacaaactgtgtggaaagtattctctttattctcaagactatgatttaatccagttagtaagagggaagatcaagatagttagcttgatttttccattattcagtagatgggcctttatataaatgaagcgggagactggcagtttactcctatactgtgtgagcttcctttcattaagacctcggtgtcttacagcttctcatgactcttctctctcccactgtcaccttctatagcagcagtctctttcctggcagatcttaatgtgggaattaaaaaaggattgatgtgtccacatattaccacagacagattgatagggtcaggctagaaagaattatgtagaaaaactcggcgatagaagcaaaaggcagaatgggatgtacagctgagccagaaaatacaaggcaagaaaagataacagagatcgaatgcccataaatgtccttatttctgtgctagggctctgtgactgcaggtacaacagagaacacatgagatcctaaggaaagagtgtatgtacgggcgttggaggcctgtgagtaccatcagaacttcctgagtttcttccaaatgtcctttcttcagtaggtatatctctgaagcacctgtgtgttgaatgaagaattacctaaagggctgaatctttctcttcttaccttttctctagtcagtgccagactttagggcatgttgtcctctgggatcacagacctcattgaaaacaaatcccagtatcccagtacggcttccattctagtgggaatgggaaggcaggcccccgttgtgctcctctcctggggatgaatgttcactgaggttctgcagtacctctatgccatggctctcctttagtcctggaaacagcattcagactccagtccgtcatagcagtcactcaggatcttacagccagctcagcaacaaacaaaaacatagtctggggctcatagcatcccttccaaagactagattttctgatttcaggtacaagattcttgtggcaaatgacaaaaacaatttgtcaattcttccgaacagaaggtccagcaacccgaacctcccagggtggaccagagagatgctgttgtatatgactatgctctgagagggatgagagtgacaaatgaggctgctaccttgtgatagccctatgacaaaaatgaaaaggatggcagccttggaagccagttgaaggaaagatacataaaacacactagcaagaacagaatgcttactctttctttttgataagaaagcccatctgtcacatgcttccttggtctagggaccaggttacaataataatgatgataatgatattaaaatatatcatttaatatcattttcattagtaataaataaaaaacaagatcaagtaagtaagcacgaaattcaagtaattagaagaaagaaataaatctaaggaaatcatgaaaatggtacagataaatgtataaacataactaaattatgagaaaaaagaaaaaatagaattggacaattttttaaaaattgaatcatgaaaaaattagattaactcttcttttattgaagtaattattcaaaaaagagagaacctatgtaataggtattatacaggtgtatagatacatttatatatacattatatagttttctatcactttgttatcttaatttatgttttagtcctccgtgtgtttctccttccttcacctgttttcaagcaggtggtgtctctgtgtttcaacatgtaagtgatgatgcctgcgaagacagaaagctgtgtttgcctgtagagtcttctggcttgttttgaaaaatctaatttctttcaggaataatagggtttatggaagtgggagaggtggaaggaggttttttggtataaatagaacagagaatggcttttccaggagagaataaaggggtctgtgggtcctaggcagcagggaacaggtcgttgtttcttgacaactctctgagaattagtaagacccaagagtgggatggctgtttgataattagaaagagttcccaggcttgcaaaatattttggggactccataaacctgaaaaacagaaatcttccacttagaatacacacctaacatgaatagtttataacatattggataagaaggctatgtttgtgattccactcacagaccatagtgataccatttatagttaaattggcttgtgagaacgattactaggcaaagaatagaacttgtcttggttgtctttataatcacatacacaggtctgtctctttgaagcattagatctcaacagttcttaagtttggatattgggctgggacagatgaagaagacctggggatccctcagttcagctctcatggcttcacattggatgtgagcacagaggctgtcaaagacttttcccaacaggctaagggatagggcaaacagtcacgctcattgtggattactcagaattccctatgagaaaggcataaaaaggttgtaaattcggtagtaatcctgaatttacaatcttatgcagttctgcccatcaacagggagcagacttcgtgatctctgcacgccaaagggggaaagaagatcaaagcttcttttcatgctttaacaggtattagcaaaattctgagaaggattgccaatatcctgttcataatgaatctaaactggagtgaaaaggaagaggtaagagctctccttactaataaggaggcagagcttcctccacccttcagtcttccagcctgaggctcagccacctacctctgcgtgctatgttcttttggcacctgcagcctgtccccagtggtgctgctgggcttatggctcccagtgtcaaggcagcaaacttattctcaacaggtgtatagggaaaggcaaactcagtgaatcaaatatttttaatattctgaaaaaatgatctggaaatacaaacatataacatttaataaatattatttataaatcatatgaaccattatcaacttctcttcctctgcctcagccatgtcagtaactcagttactctctcttatttcttggcattatatgatactcgagattattcaagtgtatacattggcctatagtagttgcttttctgtttctatcccctaaatattggttatattatcttattttttgctcctacatgaatgggacctacaatataagcagtccccacatacacacacacttgtgcttaaatctcaataatctcctactagtgaatgcagtgcaggtctctttaatttatggttacttttttccagtttcttccatttcaacaatgtgcacattttgttttttgtgccacctcacaatttttctttcctgactctttgtttccttgagaggatcaggcaagaggaaactgacttctctcatctatccatacccactctgtgatcttagataggcttcttcctctatcatatggagacaattttacctactctacctcttacaggattattctgaattatcttccaaaatgaagatatctttgcatcaaataatatagaactaggaaagaattatatatatgatgagatgagcctcattgtatgggtgaagtaaaatgtggactatttctgaaatggattgtatattaaattgcaatctggttagaggtttaaatcactaaagaggtagttattcatataaaactgacttagagttgctttgataaattaatcaggaacacagaccagttaattaatttatagcacctgttaacatccaaagaaattaaacctttcttctcaaaattaagctctaaccatttacactatagtcattttaagaattttaggattatgggccaggcgcggtggctcacatctataatcccaacactttgggaggctgaggcaggtgggtcacctgaggtcaggagttcgagaccggcctggccaacatggcaaaaccctgtctctactaaaaaatacaaaaattagccaggcatggcagtgggcacctgtaatcccagctactcaggaggctgaggcaggagaatcgcttgaacctgggaggcggaggttgtagtgagctgagatcatgtcactgcactccagcctgggcaacaaagcaagagcccatctcaaaaaaaaagaaaaaaagaaagaattttaggattatgtaaagctactaattggcttacagaaactgactaaaataggaggtcttttccttggaaggaaaagatgtaataatctcagttttggataaaattgggtaaacagatttccctacggtggttaaagggataaaaacacaagatatccccagcatctacattacagacttcaatgaaggaagtaaaaatatctcaatagttgagttgaggaagtgggtcaaggatatgaatatccacagatgctgacaagggaaatatatgttatattcataaaattcaagtaattaagataggtaagtatacatgtccacttaggttagatgttaattcttaataagtaacataatgatctgaggctgtttgtgtgccacttctacatctcaaactttgacgtggatcccctggagatcttgttaaagtacagattatgattcagtagggtctgaaattctgcatttctaataagctccaaggtcatattgaagccgctattctgctgagcaaggtttccactatctgagaggcagtattccacaggacctaagtgggtccactctttagccacactgcctagattagaagactggctctgcccgcttactaactatatgattatgggaagattaatgaacttctctgtgtctcagtttcttcatttgaaaaatgagaataatgttaacttcctccagtgatgttgtgaagaataaatgtgttgatttatatgaagtgtttagaaaagtcaacaacattgttaattgtacatattgtttgtcaagcttgccatatcaaaaatatctatgtgtttttgactactaaatacctgtgtgtttttgattggtatttaattggctacttgtgtactagttgtttaaaaagggacaaggtgactaattattgagttttacatagttgttacacttcttcacataacgcttgtcacagaacaatatagtcatatattctgggcatttttcactcaggatgagtgtggctgatgaggctgatgtattcttggatttttctaggtgatgattcatctgggctgggcctttcattagggcctgttgagaaagaattgaagtagtaaagttgagcttcagggaatcctctaaatagattggttgaaacacagtctggtttatatacataatctcaatgaagactcaagacatccttgtggcataagtaatataagccccattcaactcattagaaaactattacaggcgtgggttaagtaaattgtttgatgtgacctagccagtaaatggcaatgatggagtattaatataagtatatctgaatccggtatcaagtcatttaggcagaattcaccacttctctacgaaaagtgttaagtgttaaaaatatttctgaaagttttctcttgtatccaaacatttttatattcagtattctatttgtcctggtgatcctgagctcccttgaggacattggtggcactaaggggaggcttacacagaactggtgccttgaactcagtttcccctcaccacccttatcacactggaggctacccagggtggactcagagtggaaggagaattgttcatgtggaccacaggctctcaccgtggaatgattctggaggacttgatagtgtggctagaggttctattttaagctctgagaaatgtggaaaatctcctggggaggtcaacagttgaccctggccctttcctctctggtgcaacctccaaagggctattctatttctctcactgagctctactttatgtgtaaaggcaggttggatagtttccaaatctttgttgggctgcccctctaaaccttggataaagtctttccctgtggccccattgttagcagttattacatgtccaatgtttgcctgtaatgctgctacaggtcttttttgacacattagttttgaaaattgtttttgacagcaactcttttggacactaaggacctggaaggcagagaccttatcttgtctcatttatatcccccaaatctagtacatggcctgaaactgtgtttattaaatgaagaatgtgttggaaaattagattctggagaaaggcttgcttagaatattttaatcagaaatgaactttgtactttttcgcctatactcctacggagccacattttttctaattatataccaagagggataatggtacagtttgagtgtgagtgtttttattttcttttttatatattgataacaaactttttttataatgggcatatttggggtagaatattttctttttaatatattgataaactttttttataatgggcacatttgggatagaatatacttctatcccaaatgaacatgaaacaagcaaaacatttcttcaataactgaccaaagatgatagggattccacttcaccttagaatatgaatagctaaatagtgtgacttaattgtgtcatatattatgaataacagagttcatgagaaaatgagctatattttcatatatttgacggagcagaatatggcagtgaaagagcaaaatctctttcatctggatattcatcatcccaaaccaaatcttcattaaacttgggtgctagagctactaggaaagctcttgggagtcttctttgagactttgcggtgtggcttctgatgaactgttaatttggagacttgcataaatgtaaataaagtggcattaggacagtcctcaaaagccaaaagatggaagagtgcaaccaaacctggctcatttgcaattgcagtgatgccttgtggaaataaaattaatatctggggtacagtggctttaaagcaagatcctagatcactctaaatagctgtgaatcaggaaaaaaaaaaagtttccggttgctggatattctagatcttcatttctagattccaattatttaagagaccacagagcctttgtcaccaggacagagtcatttgctctgataaaggggaacaagatcttacaaagaacattgttgatgtgaacaactagtttactgaagacaagtccttcaacacaaaaagaaacaagaaaaagagaagggacaagcaaattgttatcgttcagtcactccttttcaatccacttgttactatcctgatccaggttctcattatttctcacctggctaattggaatagcttcttaagtatatcctctaccacttagttcatgcctctccaatctgttaccacctctggagttgtcctgctaaaacacatgtgtaactagattactaacctatttcaggaccttccacagctcttcattacccaaaagtaaaactcaaggtttatttggccatctacaccactactccccgtaactttttatcctcattcctatcattacctccatgatctctgaacttcagcccatcagatgacctcactctaacacctccttcttttatatgttatttcttcataaacttggcaaaactctacgcaatcataaaggcccagtaaacatgatacctttaaaaaaaagatttttccaagaggtgcctctacttcattatatccttcaggccaattcatgactatatttccttttcttatacccagtagttcttacttagaatagaaccccaggaggaagatatgactccagccacactgttctgaattccatcctttttataaggatgaaatccagaacagaaaaattctgtggcagaatttttcttctgactgaaactgcaaggagattcaagcactaaaaaagatcattccatattcccaatcagtataatgacaacgatagttaatcccagtgtcaaggaaattttcttctcatttccatcttgaagctaaatcgttattctacttttcagataaaagcatattatatctaaagggctcgggttatgggattcctcaaagaagcagtcaatagcttgtaatccttgagcagctcttttcttgttcccatgagccccacaggctgaccccctctattttaagcccctcaaggaatctggattcccacatacccacttacaggtaaaatttttaaaaagaaaatgcatatgcattgtattttcccatttaagatattaacaaatagtcatatggccaatctgactatctttactaatgactgtatgcaatggctgaaacaatcctctcggtacacaagattttgtgatatttgaatacatactatactcacaccacaacatctatatccttaaatcactataccaatgcacaaacagtttacatatcaattcatgattatgtgttcacatctttctgtctagtaactgctggggttacaagagtgaaaaaaaaagcacaaccttttccacaaggaacttgtagatgagcccaacaagtgcaattaccagatagtgtgatgagggctttgataagcatgaaccagggatctaataacagagtaatgcagtagaatatcaaaaaagtattctaaattaaataatctacaacagaattgttcatctttaatttagtaaaaataggtttatgacactcatgctctatggccctgtaaatgtagcatcatttcacaccacatatgccccctactacagttacagttactcagatactacatggctcagcacgcttgttgaggatatcagaaatgataagatggtactttcattattttctattattcttttattctggcttttaaatgatcaatgtttaaaaggatatattttccattttttttaataaggtcacaatactctttctgtaaccggaccccagtccagctgctctccacttgaaagccaaacagagagccgagggtagatgggaaaagcaggtttaatatgagagccagcaaactgagaagatggcaaactagcattctaaagtaccattttacatttttaaattcaccatgagattttaaaaatgaaacataggatgggagacatgcaggaattctgcagggtgcagggtttgtgtgtcttgttctcgaggctgtattgggtaattgcgcctctgggggtctggaagttgttatcttgacttcggcctggtggtggtggacaaattgttcacaagtccccctaagcttgatgatgcctcaatggggactgcgtggtttgtttctaggtttgactctgggatttcttaagcaagagaataattagacaagcatgcattactggcaaggagtgtccagaggggaagaaatgaagggatgagaggggagggaagggaaggaagaaaaagaaagtgggtgaggtccccagttacatttctactttaatcttgatatttatgcctaccaaatgcaattgggagaaacagagcattattggaaataaatcacttttctatctctccacaggagggtagtatttcaaaaggcaacatacattttgggttggaggaaggggcgggtggagagtgaatgattccattggctgccacactgaggctcctggctttctatggaactcaaagtgggtggcagcaagcactcttctagcccagagaagtctgttccaggacgggctctttcaggagcagctaaagtcaggggccatgtccaccatgtgatagaaagacaagatggtcctgaaattctccgtgtccattctttggattcagttggcatgtgagttgaaaaggttcccaattaaattaacagaaaatccctgatggcaagttgttttatggcaaagtatgaaaggaggaattataaaagaaggaagaaagggggaaagcaagggagggaggagaaaggagtaaggagggaggaaaaatcatttcaggttgggaaacaatccctaattcccttccctggttccttctgctctgtttctaaacaggggtgagcacccagctgctggagcagagccctcagtttctaagcatccaagagggagaaaatctcactgtgtactgcaactcctcaagtgttttttccagcttacaatggtacagacaggagcctggggaaggtcctgtcctcctggtgacagtagttacgggtggagaagtgaagaagctgaagagactaacctttcagtttggtgatgcaagaaaggacagttctctccacatcactgcagcccagcctggtgatacaggcctctacctctgtgcaggagcacagtgctcttgaggcacctgctgcctgcacccaaaccctgctgccagccccagtcacgaggctgccacatgcctccagctccgcctcgcacagcttatggcatgaatagagagaacaacctcagcccctcatggaaccatttctgctgcctttccagaaaacattttccacacacactggaggacaagacccctctgctataacacaaatatctggaaatgcagcctgctattaggatcattaacgatatgggcctgcaactccccggggtaggcagtagcaaagagagtcgatatagagggacaaatggaagctatcagacagactgtttctgagtgttccacccctgtgtagaaacaaagcagaaggcaccagggaagggagctagggattctttcccaacctgaaatgagtttttctccctccttccacctttctcaccccctcattctctctttcttccttctttcattaattcttcctttcatagttggcatcagggattttccatctctttaggattttctgttaatttaaatgggaacgccttcagctctcatgctaattgaatccaaaggatcaacatggagaatttcagaatacttcatggttcagattggtcattccgttttccagaagaccacacccaggaatgttcagtacaatggggcagaaatggatggtttcccagctttcttgtagtactccagagatgatgaagctgctatctttccagactcttacactgcagtaaaatgcagaagtattgtaaaaattagaagaaagttactacctttttggaagaaagataccgatagtacacctcagtagcatccaactgtggtttcaaagcaacatcctagttggtggttctgaaagtgaccaaacattaactacaatggcctgtatgttcataggactggcttggggaagagtctttgaatggcaaatgtcaataacttcaagttttcaagcctgaagaagaaagaagttggcagtttcctccacatagcaagccctccactggcccattttcatacttgaagcagttgtatttgttctgtaaggcaagatgataagcaaaatgcacatgagtttctgagttttgaaatcaaaataacttaaattaaaatctcgtttttgcaattttctagctctgtgtccctgggcaattatttatcctcacctacatttccttataaattaatgttagtaagaacacctatcttgctgagttgctatgaattaaatgagataaaatacataaaattgtctcaagttccaggcataacatgtatactcaacaaatgtccttaaaataatattgttatttatggccatatgtaaatgtcacccctactgtggaattttcactgactacttaagggggaatgagttattctctgcctaatactctgagtcctcaccagaggagtcaggaaggcagacactgcaagctgccaacctaatcacaattcttttctgcctccttattaacaatgccctcaattttgatttgggcaacaatatgtccagctttaaaaaagctcaacactacattttaccctctcttgcagcaagagattgccatatacatatagaacagttctgaccagtgagataggaccagaagttggatagggccttcccataatgtttttttctctcctgatacaagtacacatctctctatccctccttttctctttttaaaacatggaagagataactttaccgtaaaggaaaacacataactaatcccctttccttatcccatgcctggtagtcttttagatgccaagtcaaatccagcccccagatttaattttgcatgaaaatttttaataaaccattatttggttgagttttctgttgctgcagctaaacatagttctaactatagtaagattgacataaaatggctttatgatttcttgtttccatgtgtaaaggcaggaaaagatatataaacaaattactttgtttatacaaacatggggactccatttatgttgatcatatctgtttcataaagtattaatattcctatatttttttataaaggaaaaaaacttcacctttcatttagagaggactcgttattaaatttccatagcaatttcttatactcatggaagattatggaatccagatttcatcctaaagtcttttaaccacagacaatttccatgcaaataataactatagtcttacatttgtcttaactttatattccaaaggttatttttcttattttcttaaccttactctacccagtaatccattttaaaagcctcctctaaaaactttatcacattaaactccttcattctgaaaattttaaaggcaaatacaaataaaaataagaaaacaattttaattatctctgatgcaaaaagagaaagacactctcccctccctttcgttagagcacctactttagaaaacttgtaattgtgagttttctatccctttgaaatgtaggtaaatctttttaaaagctaaataaatcccttgccagttttacaatccaggactgtctttctcaagaacctgagagcatttttttcaaaatgtaatcacgaagggaggtagtgccctaatctagttttagtggagaataggtgcctaacttcagctggtactttgctcccagttgcaaaccaacctcctgtcgtaaagatatgagaaatgtttcctttgcatgaaggcaattacgaaacaggtggctacctcaattaccaggtaaattgaggatgaactatgtttgaaaaatgatgctgtcaagtcctctttcttgcggactagttattgtttatcttgagaaactgtaaacaatcagttgcatctgctcggctatataaaaggataagatttctttatttccttgtaatatctttagtggattgcctgtgagatgcatcacattctggtttaatgcttattcaataaaactgttttttttttttttttttttgagacagagtctcactctgtcacccagactggaatgcagtggcataatcagggctcattacaacctgtgcctcccaggctcaagcaatcctcctgtttcagcttcccaagtagctgggaccacaggtgcatgccatcatgctcagctaatttttttgtatttttatatagatggggcttcaccatgttgcccaggctggtctctaactcctgagctcaacctatctgtctgccttggccccccaaagtcctgggattacagacgtgagccactacacctggccaaaactgttttctttctcttctacctttgtgggaaggtgttatgggttgataggagattctgttttacttcctcaacaaaatggcccagggtctttccctaatcactgggcttacatgtctcttcctgaaaagcaccatgacactatgaaaagagcaagggtttctaaaggctctgtcccttattggctgtgtaaatttgggaatattatattaacttcatgagcatcaatttcctgataagtactgcaggaagtaagaataaatacttaatttacagtattattgtgaagattagcaatgttttggtaactgcctagcataatggacttacaaattaaaaaattgaaagtgggaaccacggcttccacaaggtacactcaaaacctcatttgtgtcctgatatatgttttgagccaggaatatgtgtaagagttaaagaaagaggaaagaaacacaaaacacagcttggcagttaaagacaggtttactttagataaaacctgagaggggcttctggctgatttatttatttatttatttatttattttatttttatttttattttttggtcaggagcactttctcttgcagactaagagtatatattggttttagggtgagggggtttatcacaatcttggaatgtttatgtgtggaggagaagtttatggcggggtttggaatctctctgggaggaggggaggttatcttgaggctgatgtctttttggcaggagggggattatcttggggctggcaccttcccagtcagagcagggttatctcagagctagcatgcctctggttggggaggagtttggaatgtttctggttggagatgttatttgtggtttatggtcatgctgaccatagccattaggctgatggcctttggacttaggaagtttttgattaaggtgaatgttaaaatgagggcttgtccaagacagcgatgctcctgctttgtcaatatggaaaggacacagtccctgcttccaaggaactcactctcatggtgatagacagtcatagacttgctcccatagccatcattctccaggggctataagttgaagaatcctctgacctacaacctccattcagagcagtaatttctgagagaaattgcacactctccacactcctgaatcactgtatgccttcctaaaaacacactgctgatgtttaagaccagactcaggcaccacccctgggtggggcatctgcattgctgcagaggaagtggtgttagctctagggggtactctaacctgagaaaagtctccttaggctgtcaggaggattgatggatgaatggagaataaaaatctctgaaacaggaagaaggctaataatttaggctgagggtgggggatcagtagcaaaagagtatatggaccataaaattcttaataacatacataatcctgctttcttatcaccaattctcctttatctccaagagccaagatgaagcttaagatttaaagaagacaatttgtttaacatttatttatagttcatgaattaatattttttagtatcaggggccaatatgagactagatctgtttgtccagaaattatttctaatctctgatcactgttcttatctaaaccatgcctatggacatagagggtagaaggatgattaccataaactgggaagggtagtgggaggctggggaacaggtgggactgtttaacaggtacaaaaaataggacgaataagacctactatttgatagcacaacagggtgactatagtcaataataatcgtacattttaaaataaagaatataagtggattgtttgtaactcaaaggataaatgcttgaggggatgaacaccccattctccatatgtgcttatttcacatagctttcctgtaacaaaacatctcatgtactccataaatatatgcacatacttaagtactcacaaaaattaaaaattgaagaaactcaaagccaagaaaaatttttaaaaagaagcaaattgagaaaatgtaaggtgtagctgggaagaaaaggatagagaaaggttaagaagaaaattatggaggactgtctgaattgaaaagcattgtctctgtgagtttgtcaacagcaacattactagcattttgggcagggtaattcttttgggggaaggggcttttctgggcactgtagggtgtttaacagcatccctcatctctgcctactagatgccagtaagattctcacctgtggcaaacacaaatgtctccagacactgtcaaatgtccctggaggcaaatagcccctggttgaaaaccaatggtctatatgtctacatattgaatgttgaattgatagagcaggaaaaacttttagaaggtatatatatgtgtatatatatatttagtatatatatgtatatatatttattatatatgtatatatttattatatatgtgtatatatatttattatatatgtgtatatatatttattatatatgtgtatatatatttttattacttatatattcatatacacaaaatgaggatgttaacatttttctactattataacacatttttattcctatggtggtcatacgtcctaagttgctattatttcatttggctttaataaattaaataagataatttcaatgtaaaaacgggaattgtaatatatatatataaacatatgtattttatatataaatatatataactttttatacaattcattcacaatgcaaaaaatttttcagtctgatcacgttccagatttcaccttggtcaatatcttttatctctgactcctcaaagacatatagactgtttctctattctttctctaagctactgtgttcctgttcttccccaaaatgattcttaaaccctaaaaagatgacccctccattaccccccacccacacacatacacacacaaggactcacgcatacgcaccacagtgtgcagaaggtgaactaaaccacaggtaggtggagttttccactaggaagctgaggggcaactcccgggagctgctgccgctgaatctgtctcatgaaatttctcagccatgggaacaaaattagttccaaattcaagatatgatacttaccaatatttaaagagaatagatatcaaggtgtgcccctgtagcaaaaaaagtaaagaatcatgaaggcattaataggaatcttgctgggcttcctgtggatacagatttgctgtgagttaaggacagcccagaggaaacctggaggagtatcacaactgaatttggaaaggagcaatggaggaacgggagagatggagaaagagaaagaacgcaactctcaattaagctgtgtcctctatcataaggaagaaaactacagagaaattttctacacttggaaacagctacagtgattttgtgatgactctcatctgcatctacttttctctttctgaacgggggtaaaagcgcaaatgaaagtggagcagagtcctcaggtcctgatcctccaagagggaagaaattcattcctggtgtgcagttgttctatttacatgatccgtgtgcagtggtttcatcaaaagcctggaggacccctcatgtccttatttaacattaattcaggaatacagcaaaaaagaagactaaaatccgcagtcaaagctgaggaactttatggccacctatacatcagattcccagcctgaggactcagctatttacttctgtgctgtggggacactgtgctcttcagacacctgcagcctatacatgaaaccatagctgaaggcctaacccatccccgagagtggcagtaggtcccgatgtgattagcattgcattcccactgcctacatctccttgcatgtcctgattcatgtggaaagtatttctaaatgagttgtaacttgacactatggtgcaggtgcataaatggttcccctgcagatatctgtgggaatggtattactaggcaaaatctattgattgatcaactctttcatatattatcatatctctctggataagaatgagcagagtcctcaatcctccatatccaagagcaagaaagcaccagtctcacctgtacttccttttccacatcttttttatggcttactttagtacagacagaatcctaggaaaatttccatgatattttttctaacagacttaagtgaagatgaaaaggaagagggaaaatagatggcctctactaccatgaaggatggtcagagctttctgcatacttgaccagagactcagccacttacctctatgctgtggagacacagtgcttcccaggcacctgaagcctgaaatcagacaagtacctgcaattctaagactcaacaataagttagagatgtccatgtgttttgctgtaacatggttttgagaagcatacacttgataaatcaaagtgatttcatttccaaaaaagattctgatgaatacttactctagtaactatctctgtgctaaacagaacaattcctaacatcctaatccctaaatcagggaatcaatgagtcagaaattctagataaaggatccctcaaactcaatgataaggctttctgtcaaaaagggtatttgcaccccgaatgctacttattcttatcttacattatctatgtataaaggaaaatcttgagaaagtcaaaccaaaatgtgtcaaaaaagacatgctaagctctctaatccttcattatttttttttccaacttcttttttttttttgaatcggagtttcactcttgtcacccaggctggagtgcaatggctcaatctcggctcaccacaacctccacctcccaggttcaagcgattgtcctgcctcagtctcccgagtagctgagattacaggtatgcgccatcatgcccagctaatttcttgtatttttagtagagacagggtttctccatgttggtcaggcttgtctcgaactcccaacctcaggtgatctgcccacctcggcctcccaaagtgctggcattacaggcgtgagccaccacacccggtctccaacttcttaaagtatttttaattgttcattttgctcatattcaatagtatctatatcattttcctctttgttatgttttgtgaaggttattagaaaaaagcttatttccagtcatgagtatgctatgtcatcttcagcaagtgagtcattttatttgtccctcatctcagaatcctcatttataatgtgaagatgatatttcccacccaccactactcacaagtttgatacattaattattcaacaaataattatcaaatacctattaggttctgtagggaactttgaataaataaagagttctttccttgttgaatatatttctagtggggaacacatttttattatcagttcctataaaatagagaaggacttaactgggacagtaaagggtattataaaaacaaacagatgtctgttaaaggaagctttctggagtatgtggtgcctcagttcaaaatctggcaatttaataggagttaatcagactgaagaacaaaagcaagtgggggaaggttctccaatttgaggaacagcatacatatataggcaggaagcaaggcagattatagcaattttaagacataatgtataatttgcaagttattaaataatgtgcataagtaactcttattttatgggagactaaataagaaccttgaaatgaatcgtctgtaaatcataatatggtaaggtgaaggatatggggaacaaaattactaagcatagctacatcctaacagagcagataaggataactgcactaagaacaaataaaaataatcatgcaactgattgatgataagaaaatgttagttcttcagagaccctaatcccttttaagtgtggaaagtatttctaaataagttgtataagatatgataaatatgatacataaatgtgatccattttgactattaaataaagctgaaatttccaatttgataaaagtctccactgattcaaggtactcagcaaactctaaacagggtaaatgtaaagcacatgcacacacacacacataaacacacacagaacaagagaaatgcatacttctacacatcagagtaaaactgctgaaaatcaaggaaaaagagaaaaatccttaaaatcagctttgcttttgtttttcaaagggtcaatttcatttccctcaagtttttctgaaatcatggatgagtgagtctagcaaatgcccagccctcttcaggagccgggaaacatatgtggcccagttgcaaatttggggacagcttatggaggcctgaagatcactgcatttgatccacataggtagacacctgagcagctgggctggccaaaactaatttgacattatagtataggcaagagaatggcatggactcctcattccagtcaaccaaaagcaaagaagaggtgttattctactggctgagatgattgatgctgcctttcatggagaaatggtttgctacaatacagtgggggtaaagaagagtatgtctgtggaaactcttaatcccaccatgaatgatgataaaatttaatggaaaactacagcaactcaatataggcaggactgctaagacatagatcttgaggttatcatcccaccagacaaagaaatatgattgctgagggcaaaaaacaataatgaatgatggcagaagaatgaaattgtgcatactagctacaacctcttgaccagtgacagaaacaagatctgaagtagttatgggtacatcttccttactttgatgtgtgtgtgtggggcggggagggttaacaacccattctttttatttcttttattcttctactgtctgcaatagtatgtgtttttatttgttagctttatggctcactataaaattcacaggttatcaaaggagaagtatgactcaactagaaaaagaataaacttcatttaaagatgtataaagtgacacaagggaccttgcattttcttttggggaaaaggttagcatccttacaattttatggaagaaattgcatcctattaggtagaataattattttactattgtcttatatggaaattaaataccatcaaatgaggtatgacctaacgcaaagtttataaggaggtacaaaatggtggtttgtactggattaagcagggaaccaagtttcccagagtttccttttttgtatagtagcaggataaaattggccaaagagtaatgtgtgtgagctatggaaggcaaaagtgaaacagtagccactgctctctgaagcagtcatttgtcatatctgacaaatagacacggatatgcccagcaggtgccagcgtgttctaactctgttccactccatgcctagcatgccttcctgctgaccagtcaccttcagatgcctggcgatagatgaatggagatggtaaccacacaaaggcaagagcttccttagacttctccttgaacttccccttcaaatcacacttcagcagctgcaaatgcttggtttctcagattaactggttagagtttccttctctggccctcccacagcccttagaccttcactttcctgtctcctttcacaatcacgtaaagccaaattcccataattaagcccctatcccatacaactcatggtgactttcctgcacttgacgataccctgattgatgcactagacaaatataaattagttcaatggaaagttgtccgtcttttaaaaatgtgtatccagatacctattgggagaaagaacaatcagaaatctagtcttaccagaaaaagagtagaccttaaaagaacacatgtagcaaggtgagttgcaagggaaagaagagagggaagaaagggatacagcctgtgggctcctgcatttccatgaaacactgggtgtaaagaatcaaatttactgaacttaaagtataataataaaaaaaaatctatctatatatatatacaaagaatcagatttatcactatgtgaagatgtaggaattatttttaattaaaaaattctcatcaggaagaaattacttataactttatgaataatttaacatatatcaatctaattctgtgttgttaaagtaaagatatcaaaggaatagctctactcccatgtttcagaaattcctggtagtataactgagtagtctttattagggaagacagacttctctaaacatatctggtgactcagtttggtgtatgcaaatatgaatatggatatgctatgacaagtgtccccaccccctcccccaactaatttcctgtgcagagacagctgtgtcacccatctccactgattctgcaagggacttgtcataaatactgaataaggccaaggttcaggctctttagagtggttacttccctaggaatagaagtgtcaacgtgacttttataacatgctttgagcacgttataaaatttgtaaattgataggctcatcttctgctctcccacaagctcaaaacactgtgaattttttacatctccagaatagaacctcttgctcttgtgtggcggagccatcatcagttcttttaatgttcaccactctcggtagataaaagttctatttcattctaattgttctatgatatgatttagaatcactttaatgacacagtcttcagtgtgagaacttctcttggttccagcatgcataccccaggaggagcagaatctcctcaggtctaggggacctagtgggctgtaatactctctctttctctctctttctctctctctcactctctctctctctctctctctctcacacacacacacacacacacacaagcaacaaggtgaattcaccacaaatataaaattgtgagccaccaataacccacaatcagcctcaaagcttgctgaaaaatctcgcactaacacccctcccaaataaaacagttttctgtagcaaggcatagagtcactcatatccaatgattcaacatggggcttgtgatgcatctgtgcattgtgtattttgtacttttgttgtctaaatggtgagtctgtgtgcatgtgtatgagagcacgagcgagagagagactattacagaccactaggccccatggacttgcaaaatcagccttcttatacatgattcatgcatggatcctcatgttttgcgtgtgaccacccttcctaacatcaagtcataaatttcctacagacagatactgaaattcaactataatgaacggagttcatttgctgagcactcttggctataatttgtctgtgtacttttaaaattgcagatacctttgtccggaatgcccttttcctacaaagccaacttgttaatcttcctttatctcttaaggccccagctgaagggctctacctttgtagggtcttccctgactccacactgctaacctcctcagcagaactaatggatcaccgttatgctttcctcataaaaacactcatgtctcgtgctatgttgtaagtatatagttacacatttttctttctcttcaaattaccaggtatttatgaatgaagattgtcccataaccatatttgagactctaagccaggcacattgctaaatattgcataaaaactaaattaatattgattgatatataaatacacaaatcaatgaaaatttcttcactagaaagtctgaattatataggtttaaagtatataatatgcaacacagacaatttatcagtttctcctgaatcaattatttttaatagactatatatatacatacatatgtatatatatactatatgtgtatagtacatatatacatatgtatatatatactatatgtatatactatatattatatatgctatatgtatatactatatatattatatatactatatgtatatactatatatattatatatatactatatgtatatactatatatattatatatatactatatgtatatactatatatattatatatatatatactatatgtatatatattacatagacatatatattttttttgagatggagttttgctcttgttgcccaggctggagtccaatggcgtgatctcggcttactgcaacctccatctcctgggttcaagcgattctcctgcctcagcttcccaagcagctgggattacaggcaggtgccatcacgcccggctaatttcatatttttagtagagacagcgtttcgccacgttggccaggctggtctcaaactcctgacctcaggtgatccagccgccttggcctcccaaactgctgggattacaggtgtgagccatgatgcccagccagacttaatgtattaatggacttaaaacacttttaatagaggcattttaacttttctgagtatttgtttcattattcttcaagtgaaaattcaaaatgtttattaccataataaaatatgcatcaaatattattttattatgtgttatcagtccttgctaaaaataatttcaaaaaacattttggaatttaatctcagctgaaatcactagttgccctactaattcagcattaaaagtacaattgattcttcttccttcctccatcatagtaaaccatggggaaatacattacctgtggaccaagagtgaagataagcagctatgttgcctttttggcatcttctggtaaatttcatgaatatattgtctatagactttacaggattatgtcaccgtttttctcttttgaaaatacagaacacactaaatgatctcattcaagttccaatagagataatttcagttcagaaggtgatctaatacagaagataaattttgttgtgctgatttgtgtttttgagagaggtacccagaatttaaatttaatttaattatgttgtgctatttatcatatagaaaatatgggcatatttgaagaccatattagaattcaattgcactaaagagtaagctacgaaacttctttgtgttctaaattcatatcattgtattaaataaaacatcatacccatatgcgtccccaataagtatcaatccttattaatgtttttaaacaagatgtctgccttagtatgccagttgacaaggtgtcagtcatttgaccttatgtaattctctaattttcagctatcattttctactattgctgtgtgtgtgtgtgttctctaaaaacttttccttctctttcaatctcttgttttttaactttttatggagaaggcattataaaatcatctttaggaaatacagaaacacatttacagaaactttctacatttgaactaaagggggcagtgcttcctttcataaagataaataagcttagagctccacacaggttgttcatatgtaaaatgaagggtctgtggaaggacatgaataaagcacaggaggttgaagtcagatttgcagctttctaggcaggagacaagacaatctgcatcttcacaggagggatggccatgctcctgggggcatcagtgctgattctgtggcttcagccagactgtgagttgtgcatgggaggtttgaatatagtaagaaaagctacaaggaacactacaaggctgggagataattggagaagttttgttttgttttccggatcttgatggtttcctgtggggacattaaaaataaaactgaaaatctgttattctctttccaaacaggggtaaacagtcaacagaagaatgatgaccagcaagttaagcaaaattcaccatccctgagcgtccaggaaggaagaatttctattctgaactgtgactatactaacagcatgtttgattatttcctatggtacaaaaaataccctgctgaaggtcctacattcctgatatctataagttccattaaggataaaaatgaagatggaagattcactgtcttcttaaacaaaagtgccaagcacctctctctgcacattgtgccctcccagcctggagactctgcagtgtacttctgtgcagcaagcgcacagtgctctccaggcacctgcagcccgtactcaaacctgctttggggactcagactgggagacacatagactcgcttccatttacacatgccaatatgagagattatgctttgaagtaggtgaggcaagttgagcctaaagaaagactgatacatgacaaaaccttacaaataagttaagaaagttccctgagttttagagtgtttaagagtctaaccactctccttttctactttcagaaagaggttgctgatttagctaaagcataaatctctagtgatgctttgtttctgctagcttctggaatgcgggtgccctgtctcccttgtatactagggggcaaggatgtgtgtttggaatgggaaaaccaaggtcctactgcaggttcttccagtgatgaacatttcctgagatgtcttttcttttagtttttctcagtgtacaggcatttctgagcaaagaattgcatgtgtgaatactaacttatgtatatctgcatatctataaatatttctatatgtagcataaccatctgtatctatattaagttaaacattcgttcttagcaatgtctccaatgctaaatcattaccacgtggatcacactagcctcctccccttacttatccataaattcccactacaggggtgcacagcctggctctcactgttaacaaaaagttattcagtaatacttgttaaaacacggtgaggcagaatttatttaggaccatcatgataggtacagagaccactgcaacaggattttgcagtgagggagaagaattggattcaactccgaatacagcatagacaagtggagatttctagccaaggggcagattaggggtcagtggataggaaattactaagaggaaacattagaaccaagggatagtctggctagaccagccaaacaggatccttgcagaagacaggtcagggtgatcagacatcaatcccctgggggatgatagaggatgaggagcccagttggatatggagtgtaatcagatatcaagcggaggatgacgagggcagcaggggagggtgtggttcttgctaaactgacttagaaggattcttgttaaaactacattttacaagaaaatgtacagatgagcttaggagaaacttcaaaagcctgactaaagtttggtcaagcaaagaatttttgtcattaccacccactattcatttacatcatagtccaattccattaaacatgtatagtggtatcagaattgttacttgtagctccatgagaaagaattttatcacttagagcacactgttgtgtaatggtaataatgtctagattatgttgaacttctattattccacctgttttgcatgtattacattaattcttctaataattatttaagacaactattagaataatccatattttagtagagaaaacaggctgtgggagttcagggatttgttcagtatcactaactttgtgagaaaagagagttcatggtcactcatgccccaaaccaccaagtatgggcccttcctacagaagctattaacaagtcatgcttttgaacagctagcaatctttaaaattcttatcatacatgtcttcatcattgacctatagaagagtgagattatcactcatagagaattaaaagctgaaattatggttttatatgtatattgtatttgtagataaatgattagagcttgttcctcacaggctgattttctgaagctgaagatctttacagagagaagatacagaaattcaggatacttcccaagaagcatgcggaagcctctgtaaatcccattacttatggcataatctgaacagtgacttcaggaacagtgatttcaggaatgctgaagacatttttgatcagaataggggtgatatataggttggcttagctttgttcatctagggatccttgtggggttggtttaactataaggtaaaatctgtaggttgatcaattctctcatatttaattctatattcctgaacatggatgtaaagctaactcagtgtgaattagatttattatccctccatatccaggagcaccaatatcacatgcagtattttttctgttctttttatggcttacattggtataggcaggaaaaattccaagatccttttcgtaatgcacgtaaatgagaatgaaaagcaggaaggaatattaagcatcactcttcatacttagggtattccatgcacatctcgggctcctactctagagcctcagctactctgagcggagagtctgctgtgcatactctttgctcacaggcatccagagcctgttcccaaattcaaagctgtagccacagatcccagcaaaagggcagacacgcgagagttgttgctgtcttctagcagggtgtagagaaatgtagctatgatgaatcatttcatttcagtttcaaaaaatatggaaattcagctgaataatcagtccagttactatatatccctgctcttaacaaaactatttcaaataccttaagacaataaatcagcttttcttcttttcagatatatttaacatgatttataaattactgaaacccattataaagttctgttacaatggacatttttcactctaactgctgttacatttaccccatttcatgtcttgcataatggggagggaatatattaatgctgtctttatccttctaaagcaacgtagaatcataccagaaaaaggaatactacatccaatctcatccctgtctttttgttcaagctcttcagactgcttcaactttcacatttcattcattcccacagttatctatttacgttcttttcttatctaatatatttgggaaacagcattgggaaaacatactttctagcattgttctagccataagtgtgttgtatcttcttgagcaagtgaatcaacttcttaacattgtatatcaggaccttcatctgtaatgcaagggcaatgatttccagctaacatcggtctcaagttttattcattttatcaattagcaattgttaactggttgcctgctgagttccgcataaatgttacatgctgggaaaaaaagagctatggaaaaatacatatcttctttgactaaattgtagtctagttagttatgtaggcagctaatcagacagagtaaagtgaaatgaggccaaccttgggaaagcaaacggaggtatgaaggcatatggaaagtcccacccccatcttagccttagaggtgagtcaggggcagcctgtagtatgtcttgcctatgctgagacctaaagatttagtaggagtcaatcaagttgaaagacagagaaggtagtaaaagtgatcttaaagatagaaacagcatgtacaaggtgacacagaacacaatgaacctgaggactaaaagccagaattatgctataattaaaattatgtatgttataaaatgttcaaaccaccactgcaaagcagttgtaccttaattctcagttttataaatgagtaaccataatatttgtgaggttaccaaatatgttttctatttacttgagatttcacttaataaggttattcatttgatacctaatatgtgtcttagactcgaaaacaatagatgcaaatgagaagaataaggcattgtttctgccttcagggagcatgtaatattgcagagtgtattacaatatagtataataaaagctatcataggagaagcgtagaatataaccacctaacagtggcatttaatttggaaacttaaatgtaagggaaagctgcctacgggaagtagtatctaggttaagatctgtaaaacagttagccaaaaatggagtcagagacagggtattacagaaaaagataaatagaatgtacaaagacatgaagtcaatatttagtttaagagaatgacattaaactaattcaggatggccagagcatacaactcaaaatgtatgtcagtaaatataaaactaaagcaataagcagaaaccactttgtgaaaataattaaaagccattataagatgtttgtacattacattatcttgaagacaatgatgagcagtgaaagaaatctgcacaagtaaataatataatgaaatgtcactgtttgaaagattactatgagttcacatacttatatattatatccatgtgtgggcatgtatataaaatatatatatgtagtaaaatacatataatacattttcccttgatacttcttttttctcttaattctggagtaattctttctgtaacacagtatattgataggaccttcttatagcaagaaaaaaacctatcctgtatgaaaacttactcaagaaaagccaaaatccacagtttaatcaacattcctcagtctggccacaggggagagctgtttaaaaagtattctaggtagatgcatttagttctctgcagttaaactgttgtgatgtgtctctgattggttgcccccaaagttgcaatatcctggaagcaattgcaacaggcctcattctgagttcaaagcaactcctgttaaggaagcccattcagaagctgactggatattctggcaggccaaggatggagactctcctgaaagtgctttcaggcaccttgttgtggcagttgacctgtgagtacacgattcagtctgggagaggttgtgatatgacagcatcttaatgacaatagctttctgtcttgggaagggcccttttaagaaccagacctaagaagtgaggaaaatgtaccgtaattatgtggtgatgcttaatgttttaaataaggaaggaagagagaaaatcacccttcccttcacgagattgagcatctcattcgattgtctttctgatcaggggtgagaagccaacaaccagtgcagagtcctcaagccgtgatcctccgagaaggggaagatgctgtcatcaactgcagttcctccaaggctttatattctgtacactggtacaggcagaagcatggtgaagcacccgtcttcctgatgatattactgaagggtggagaacagaagggtcatgaaaaaatatctgcttcatttaatgaaaaaaagcagcaaagctccctgtaccttacggcctcccagctcagttactcaggaacctacttctgcggcacagagacacagtgatacccaggcctccaagacctgtactcaaacctaaagctgagccgcagatgctcccctagcacagatgcccaccacaggagtatggggaacttaccagaaggttcatccatgataaaagagaaacctgaaggaaattcatttgcttcaacacataacacaaaaagcaagccatggccttaagaccatatctaatttggcattgttttcttgataattatttaattgctttgttggtattatatgatagataacttagattcagagaaaattacatagatttcagtttcaaaaactggagtgaattcctatttgactgaagctatacatataaactccttttggatctctgcattcctatctgaaagtgaaaagtaacctctctttcttctcctaggtacccacagcttgacaataggacagcaaaaaaaaaaaaaaaaaaaaattgtctggttctttcttggacgtgaggattgtacacggtaggtatttagattgttaatcttgttacctatctggaaaggtcactagcattattttttccaaggttttaaatatctgttttggggaaatggcatttagaagtacttcaattttatatttgccttgccttctcttctcattgaggtttattctgattgatttccagctttgcccaagggaccctgagttatcttaccagtttgcccaatggtcaagatccttcctcaattgttcctttcatatcaacccagcacaacactgcatgtaggaaacactcaacaagttttaattgagtcatatgttgataagaattgagaatggccaggtgtggtggctcacgtctataatcccagcactttggaaggctgaggcgggtggatcacttgaggccaggagttcaagaccagcttggccaacatggcgaaagcctaactctactaaaaatataaaaattagccaggtgtggtgacacacacctgtaatcccagctacttgagagattgaggcatgagactcacttgaacctgggtggtggagtttgcagtgagccgagatcacgccactgcactccagcctgggtgacagagtgagaccctgtcccaaaaaaaaaaaaaaaagaaaaaaagaaaaagaaaaagaaagaaaaaacaaacaaaataatcacacacagaattccttccacaagatcagtcttccacaaacattctacaacttgcttaaatctttagtcttgtcctatcagtctaccctagaacaaaaatttaatttttcaactttctatattcattgagttttatccatcattttttttactcagaaaactttaaaattaactttttaaaaacttaattttaaaaaattaatttaaaaagatctccatgctgggaaaaattactttctctttaacagaaaccagattcccatgccttcttagaagctttttatcaaaaacacaaaacaactttatacactttgcatatataactgtttctcttatagctagtagtttgttgttttgttttgtcttgttttgtttttgagatggagtttcgttcttgtcgcccaggctggaatgcagtgatgcaatctcagctcactgcaacccccgcctcctgggttcaagcaattctcgtgcctcagcctcccaagcagctgggattacaggcacacactaccaaacttggctaattttttgtatttttagtagagatggggtttcaccatgttggccaggctggtcttgaactcctgacctaaggtgatccggccgcctcagcctcccaaagtaatgggattacaggtgtgagccactgtgcccggccatagctagtataattatatacataaactgtaatgttacttcttagtaactcttattcttagtgaaaaactgaggaagtaagtaattctaattaagcaccagatacagagtccaagacaaaggacaatccctggagctaggcttcacaatctcctaaaggcccaaatccaaaaacatagtttatagacaagttaagtgtcaaaaattgtcataaaaacacattttatgatcttaaaacatctagcagagataatatctgaacaataggccaatagacagacaaagtgtctaaattaaatttggaagaggtttctattttattttatttcaccaataatttttaaattgtctttatttgttaaagattactaaagtcacatgaacttaaaggtgtttgagttaaggtttctatttttctcataaaatatttaagtgtttactttttaagccaattaattagaactctttcacatattttggttgtgaaacatcacatacacataacacatataaatatatagacactagacacacagacacacagacagaagcagatcttgtagaactatatgattttttatttaccaaatttaagtagttgtttttattcacagtttcaattacctattttattgctctaggcaactgttaggcgaccctaaatttgcatttctgaagtgataactctcaggtgaaacaagataaaggatttgcatctcaaaatacagacagagacagggaatttaagctctttaaatttggttgtgttagaggaagattgaaaacatggatgccaagtaacacaaaattatataaatttatcacgggcttttataaggtgaccaatttcatttagataggtgcttttaatttagtctcttttttatctggaccattgaattcaaagcataactcacactaaatcttgggtcccccaaaagaggtaaacaccatggggattaggacacgccatgttttcactgtacatttcactgcaaatacatttcccctgaggctggtgggcaacccattgccaatcagcccactctgcgatcagcccattccttagccattatacacaccaaaggcaagcttttcacaataaaaagaaatttctagtaactccagaagcaaaaatttctggtagtgcaatgcaaaggagagaagagttttagatctgagaagacactgtccattttcaactcttgggattccctgaggaaaaaaatagcagtttctcccataaatgggtctgtggcacattttctgttttttcttaaggaatcccaggctgttagaattttttgttgttgttgtttgtttgtttgtttttgtcttcttatgtggtactgagggtggcaagaggaaggaaagggcgatagaaagagagagacagagggagtgcacattcctagcagcggtttaagaagaaattcagttgcctgagaaatgtttacagagagagagagaacagaggccttaaagcagtaagtaaatacatacatagcctaaatatcagttttaattaagtcaacttttgactatggagccctttaaataaatcctgtcaaatctcttattatcagattttagctgagacaaacagttgatatttctgacttttgaacttctttaccaaaagatatacccccaggtgccttaatcaaggttattatataaccgtgggtacacaagctgtctccaaagagttggcaagcattttttaacaagatccagaatcaccccaaagatcgctcagcgaaggaaagtttcattaccaataaatggggtataacccatatttctgtcaggccatgtgtttagagtcttaccttctcagctgaccatatgcacacaaaggccccaaagcctcatgtgcccccaacagatgaaaaaagacaggaaacaaaaagctatggaagtgggaaagatcaatcataaagatcaataataaattgatacccaacaaaaaagtcacacaaatattaaaccgagaggggctggatccctgaccagtaatcagactcaccctgtggatgtgaaagtgcagaattttaactattaggccacaggtggagtggcctttgtttttccttgaccagaaagcaaacccaagcctctgcaggaattttacctaccagaactggtttaggtcagatttttcactcttaatttagtcaagagaatttttaaggctggccatgacactattatatgtcctttttaaatgtgatctctttgttaatagtttagaataagagatccctaaaatctttaaattaattgcaccgaaagaaaggatgggaaaagggtctcgttgtgtaaatgaaacttctcaggtagtcaaattgttgacctttcttacccagccagggtttttagaagtgaaaattgactttctccagctgcagagtttcattcaacattagagggggccaggagttggtaaagtctaacagaaggtggaccaaaactgaaaagaaaaaccagaaaaagtgatcacagaattcacatataattgcgatctctcagcataagggtaagttatagccaactgacaataaaccttgcccttcagctaccaaatcccaatatgaaaccagctccttacctggagatggacccaagctgaagactgctgtctgccatcatggaagcagaaactaccagaaaaggagttttacagcagaataaacctcagatcccaattgaaaatttgggggagatcagggatctctggagggagaagttcccagaacttacatagcaaatcatccaatctgtaagagtaataaagagctccagccggtaccagggccccaataggagacctgctggaggccaagagccagactccactcagagtcccttcgtggtcaccaacatgtaaaccaaaaagtgactgaggcagatctctattgattagaggtttattttgccagtcgaggatatgcctgggaaatagaaacataagtcacagtaggatccttgacctgtgtttttccaaagagggttttggaaacttaactatttaaggtgtaagagcaagcaggagggaaaggggaaaaaaggagggacagtaggcaatgagacaagtggttacattcttataaggctttgattaacactcaatgaatccacattttgtgtgtgaaaaaaagagagtagaggaaaaaatcaattaagcattcatctcatcctcagtaaatctacattttacatacgatagagtaagcatgtgaaattagagttacctgtttgggaacagaaggaaggcagtgttttgtgtgactccgtttccaaccttaattttccccttggcataataactttgtggttttcagattttatttttctttccagattgagattcccatgaccccccatttgagttcaattaataattaatttgctagaacatctcatagaactcagagaaacacttacttacatttactagtttattataaaggcatacatatattacaaagcataaggatgaagagatgcaaagggcaaggtatgggggaaaggggtgcagagcgtcctcactgtcttggggcacaccgctctcaaggaacctccatgtgttcagctatctggaagctctctgaacctagtccttttaggtttttatggaagattcattaaacaggcataattgattaaatcattggccattggtagtcaaccttcagactctctccccttcccagatattggggatggagctgaaagtcccaactctctaatcatgcctttgtctctcccatcccccatcctgaagttacccaggggctgccagccatccgttcagtcaatcattaacaaagataagacatcgcttcagagtttctaagtattttaggagtcgtatgtcaggaaaaggggtcaaagattgaatatatacttcataatatcacaagtcataaaactgaatagtacttagcaaccaaaagaaataaagtactgattctttcaccaatatggataaattttaaagcattattctgaaagaaataagctagacacaaaagaatacctaccatataattgtatacatacgaaattttagaaaaaagcaaatctgatcgatggtgacaaaaatcagatcagtagtttccaggtattgggaatggaagaaggacattgacaacagtaagtcacataggaacttaaaaggtgataaaatattctatatgttgattaggatagtggttacacagatgtaaatgagggaagagagagaccctctcgtactgttttatattgttttatactcagtacctgttttaagaaaaaacaacaaggaagtaaaaccaaagacaggcagcctgacgccaggcccgaaaccaggtctgggcctgcctggcctaaacccagtagttaaaaatcaactcataacttagaaactgatgttattcatagattccagacattgtatagaagaacactgtgaaactccctgccctgttctgtttctctctgaccactggtgcatgcagcccctgtcacatacctcctgcttgctcaaatcaatcacaaccctttcatgtgaaatctttagtgttgtgagcccttaaaagggacagaaattgtgcacttggggagcttggattttaaggcagtagtgtgccgatgctcccagctgaataaagcccttccttctacaacttggtgtctgagaggttttgtctgtggctcatcctgctacatatacatttttcaaaaacagcttgactgttatgcttaaaatgtgatatattatttcatgtaatttatattcaataaaattaatctaaaaaagattaataaaaggatttagattctagatctcatgataatctgtaacacttcttttaactcaatagaagtaattcctctgttttaattttgggcaaaaaataaaagaaagagataagataacaagaagtaggaaaaggaaggtaacaagaggtagtatgcaggaattaaaattcattctcttaaattagaggacgattacatcccaggttcttcatttactgtatacgtgatcttgagcatgtgtctgagcctctgtctcctctctgtaataatttctcacaagattcaactgtctcacaaggggaggattaagtaataatatgtacataatgttcctagagcatgataaatgttcagtgaattttatctagtatttttattattaaccaaaggtggtcattttaagtgagcctaggttctctaaatcaaattatgggtggtaatcaacatggtatggcagctccagaatatttttttaatctgggcaacttgaggggctaggggtaaaagtagagaaaaaagataattgtattattatctcagaaactgtccagtagcctggaatcccaagtgctatagtttgaatgtttgtccccttcaaatctcatgttgaaatgtgatccccagtgtcagaattagggttgaatgggaggtgcttgggtcatggaggcagatccctctgaatagattaatgctctggagtggagagaatgaataagttctcactctgttagttcccaagagaactggttgttgaaaagagcctcgtatgtccccctctctattgcttcctctctcactttgtgatctctgcaaacaacagctcccctttgccttccaccatgagtggaaggagccggaggccctcaccagaagcagatgctggtgccattcttcttgtatactctacaaaatcatgagccaaataaatttattttctttataaattacccagtctcagtattcctttatagtaacataaaatggactacgatgatgggaaataatattttatcaatggaagtgatcttctattataactgagccaagagaaataaaattgaatagaatggaagttttcttttgtcttaacaaagttaccaaaatcacacattgggaggataagcagaagtctaagataatcagaaaacagagtagactgcaaaagaattgtttgaaatcatcaattaagatggaaaggaggcagggaaaacatcatagtttctagtatcaccctgaaattttgtgtgtaacaatatatgtatgtctatctacatccaaggatacaaaaccacatctgtattttaaagtaaaatatattttcttcactcaaaaaaatatataggtatctttttaatctcagtctaaatctgggaataaaattttgtggccccaaaatgtctggagaataactaagcaaactttgctagggaaagagctgtcttaaacacatctagtggctcaatttagtctgtgcaagtatgagcaggatatgatttaacaacttgtccctgcccctgccttccccactgtaccactttctttcctattctgagacagatgcattgctcacctccaataattctaggtggagctttatacaaaactgaataaagtaggtctcaggctctgagcaggcagttttttttcctagaaatagaggtgccaacatgactgttggcagcatattacgggcactcatggcctctgccttccttggtaaggacagtagctgataggctgaggacagtctaggactgggagaagacagtggggagggaagaggggatgaacaactggtcatatgtgacaaacactcaggtgtaataagaaggaagaggaaaggaaccagattctgactcctgcctttactgaagatttaacccctgccccaaaagttcttggaagctctcttacaggtcagctcaggggaccaatcttgttatttcttctcatttacgggatccagcatgtcacagagggtcattcaatcccaaccagcaatatctacgcaggagggtgagaccgtgaaactggactgtgcatacaaaactaatattgtatattacatattgtattggtacaaaaggtctcccaatgggaagattattttcctcatttatcagcaaacagatgcagaaaccaatgcgacacagggtcaatattctgtgagcttccagaaaacaactaaaactattcagcttatcatatcatcatcacagccagaagacctgcaacatatttctgttgtctcaaagagcccactgtgaagaacatgttagaagagccttacaaaaagatcggaactcaacctgaggcaattgcctattcccacattctcaggaaaaactcacaaaccttacccaggcatttgttagcagctggtggttagggtgcataagataagacccagaaaggaagtcattgagttcattccaggaagcacaccctcacaactgccttagaaaccacacaggaccacatgtaaaagccatactgctcggatgacatcacatctctatttcttcccatggagtatgccgtttaaaaaagcaacatgtgaaacatggaattttaaagcttaattgattgtacaggactttatatctgctcaaccaaatctcttgaggaaaatagtatggaagacactagggaaaaaaaacacgcatacaaaataaagatttttatggcaggatccctaaacactggccagagagatgcaatcttggtgagactatagactggagtacttttggaccatgtagaacagcagcctattctggaccagatgcatttttctatctccttggctacatttcactctaatcctgccaactccagcttggcttaccatgctttctgattctcatgttccttgcagctgggtctgctagttgggtcctccctgcagtcacatgcctatcacaagatttggttaaccacaacagagaaaggagatatgtggggagacactgctacagatgctaggatctgtagttaatcttgtagccacctaactaattcatggaaactccagaaatgagactgcagtttctaaatcccgtatttctttattcagtccccaaacccaattgtttcggtcaagcacataagactagtcttctgactctgatgagtcatttttcttccctacagattctcctaaaaatccctcctatgaatcctctgctaaggatgctaagtgaaccctatcacatgtggctgcaggcctgacacagtgcctaagccttaaccttcctcttctcttaattctgtgctctcagctaaggttttgacaacttgccaacaccaaaactggaatacacaaagtatctgccctttcttggttgttacctatttcagagcaaactggacattcctcctctaaaattttatctatctgaattcaaaataagattgccatacttggattcttactctcattggttcagtcaatcacttgttcattcaggaaatgaaaatatgtcctacgcaaagctcttcagttgcttctaattgtttcaagagaaatatccaagttctcttgtatggattaaaaattgtttctctccatattttttttattaagcccaaggtagataaaaatgtggagactgctctgtagatattcataatatccataatcgcatcttcaaaatctatgaagagcccagagaaaacccatccgaaccaaagtaaattgtaattatctaattcctcagccttgctatgtttcttgggatttctccttattgagtccaaatttactaccatgactcacaacctaactgaagccacagaataaataactcagacacttgccaattcttccatcaagcggcccaataaagactctagtctctgtgagacttttaacaattaaatataaaattctctcaacattttttgagaaaagaccttagtcttcttttaaaagaaaatggaagggaaaatggtgcagcagaagggaaaacaatgccctccttctcagactgaataggagagaggtatttcaattatgatctgtgatgtacagtgataatatgatttgcaatgcttcttatggttcagagagaatactgacaaaggtcttgcgtttctgataccaatatttcaattttagatgcaatggaagatggctagagttcccattcctgctagaaaagagtgttgcttctgcctcaataagtaaagctggataaatagaaaaattgtaactttgctttaacccatcagagacctgagattacagggcaaataagtaggctggactccaatgaggaaaacactcctccaagggagacaggcagcttatggactggcacaactgcagcagagcatagaaaaagaaatgttatctgccatacaagcaagaaaaagaaactgggtaaaagattgagtgagagctatcatcagaatatagaactgctgggagttgcagacatagaaggagtttatattcactggtagggccatttcacagatgttggaagaagtaattaggggcagggtgagacacagagagagccccagcaaaagtgtaggcttacaagacataattggcagtcactgcaggaaagcacaaatcccagcattcttgcctaaatcagcctcttgcaggaggaaaagctttaagctgttggggatggggctaaagacctgacagcgcattctgtcaccccctagagcacaggttaagatccacaacagcaaagaaaagagtcaagggaaaaaaatctctacctttgggtagagacaggaaaccattctgagctgaagaccctgtaacaataccattctaattttgctacctgtaagaaagaagcagaaaactctctcacatcacacccacagagaaacacggcagtgtttggctgccacagggaggaaaggtatgaatgctgagaaaaccctaaatccaagatccaagcacatggggccagtctaagattgaagctggaccaagacaacagagaagtccacctacccacacagtgagcctcgtaagcactaaataacaagcaacggcaaactattgctagaggagtgaggggtgaggaacagaaagagagatcctctttgtgctgaaggaattcagggacagctaaaagctgaggtagagtactctaaaaaatagagattcataaatcaatagtaattcaagaagccagcttttaagtggctcacaaagcagtaagatggttttaggaaaacttatgtatttaaggatagtattctagaccttctattttcagatccttctacttcctactttctattcctggagacaacatggttggataccactatcagagccatattaggctgactgaaccaccattgtgacttgcattatattatcttctctcaattctttatctccgtggagttttaccttaaaagatgttcattcatatacttttattcactaggtataactatgaggaagctgataaaaagggatgtttctcattagtcttttgtttatctaagatttgttgtaggttctgatacattagcagaataatataatcaatactttgatttgtttatcagatctatctaggttcatatgctacctctttgtgttcttgaacttcttcgagtctttgaggattaaatgaaagaattgatatcaaattaaaagcacagtggttggcatgtggtaggcaccaataagccactaataacagctcttgaaatacgtcatatcctttcattgctcctttacaacattgagtttataacagggaaaaaaaataaatattattgcacagactccaagagactatggactgggactcgagtgcataacattttttacttgcaatgtacattgctgaaatctagacaccccaaacttcctgcatctgcttaggcttttcaatcacggaagaccactgcactctggcaggaaaaatatccagatgcctaacttggaaaataaactaaattaggccatcttgggaaatggcatatagctctttggagggcaactttatatttaccctgtcttctgatatgttgaataaaagaagtttaaatgagacatctgctttagtatttggcatattgatataggtgagctcttacactatgaaagtatattggaaaggatatgacaaagaatatgctgctaaaatccctgaaactcgttaacacttaaaagtggttgatttcaataataaatttcaggcatctcaggaactgatttcctcaaaagtatgatttatagccatctgattgtgaaggcatgaacatcctcattctttgacattaaaggagaaacttggcaattagagggatatgcatgggcttgattctagtcagtaaatggttcaggcagagacaatgacattaatctggggctttttatattggaaaacacaagccaagaaagaaggtgcaaatatctttgccataataatgctggtgttatgatttcacaagaagtaggtgtgaatatgttttactaatgaaaaaaatgcattcattcctcagatagactacaatgattggactatcaaaggaaaattagctttttaaatactaagttgtgtgttttcatgtacacgtatacacaagtcctggctgtagctttactgatacagagaaaacaaactgaaattgaagcactgacaattttcacctaccctctacctttttcatggcagcagagctcaccgtgtcttgcaaagttgttaatagctcaagcaaacaaagaccccattgatatccaatatatgtgcaagatcccattgatatccaatatattaaaaagggactttgatctgagctttattatcctgtagaatggagtgctaatgtcttgaagtacaatggagctagtataccaaatatcatgagcttaagaaccaatagagagggaaaaaatgagacaaggaaacaaaaattttgatgtgtgatggattctattggtctatccattgaagccttgctatatcaagataccttttaaatttatactgttcagaacgcatattgaaactgtcagtaaaaaagatctctctactcttccaacagagtccattgtatatttggtacaaaaataaaacatctaaggttgtattccattcttttgaatggaagctcagattaaagtcccttttaatgtcttgcacatatattagatatcaatgggatctttctgccagccagcagataattccccaatgcagatgaaacctgttttaaatagtacttctacttcagaaactagttactaaaaatctctttgggaaaaagtcaggcacataattgtgatgtgtgatggatttccttgtctcccaattttttctctccttggttcttaaaccgatgacatttagtataccagctccatggtacttcaggaccatgtacatcaatcctctctacaggataataaagctcagattaaagtctttttaaatgtcttgcacatatatcagatatcagtgggatctttctgccagttagcagataattcctcaatgtggatgaaacctgttttaaatagcacttctacttgagcctgagaggcggaggttgcagtgagctgagatcacaccactacactccagtctgggtgacggagtgagactcagtctcaaaaaaataaaaaatatatagcactcctacttcagaaagtagttattaaaatctctttgggacaaaactaggcacactgctctgaatacttcatgaaataataatttttccaacgcctttctgagccaggtgttcctggtgttactagaatgttggtcagttctgcacaaatttacctaatttacatcctaagatgctctaccttttctttgcaatagccatcaattatgccccaattttttaaaataaatctattgataatatcatggaactggatgaggaattctaatattaagtctgcatgccaattcgtccaattactcagtagaggaaagccttccaattgaacttcattgtgtgcctgcttttgtgcttcttttatttaagcattttgaatatatgagactactttagcccttctattccattctcatttccttttcatccagttaaacttattgagagcctaaaatagaaaattcaacacaggcagtcctaaatttccaaaagaagatttgcaactaatggtagaacaaagaagcaacaaatttttttttggacagttttacattattgcctgggctggagtgcaatggcacaatcttggctcactgcaacctccacctcccgggttcaagcgattctcctgcctcagcctcccaagtagctgggattacaggcacccgccaccactcctggcttattttttgtattttttagcagagatggggtttcactatgttggccaggctggtctcaaactcctgaccttgtgatctgcccaccttggcctcccaaagtgctgggattacaggcgtgagccactgcgcgcagctggaagaaacaatctttataatgtttcttaggaacaccatctgggctgggcatggtggctcacctgtaatcccagccctttaggaggctgaggtgggtggatcacttgaggtcaggagttcgaaaccagcctggccaatatggcgaaaccccatctctactaaaaagaaaataaaaaaattagccaggtgcagtggtgcatgcctgtaatcccagctacttggcaggctgaggcaggagaatcgattgaacccgggaagtggaggttgcggtgagccaagatcatgctacttcactccatccaccctgggcaacagaccaaaactccattaaaaaaaaaacaaaacaaaacaccaccatctgtaagacatggttgaccagaaacagaataatgcaaggttggccaacatagccaaactcttctaagccatgagctctgcctctgtctcattgattggtgcctagctgctagagttcagtgataaaagtgaaatcaaaggctgtacattatttattttctttgactatgagtttatctttcctgccagatccaaaatgactaataaaatgagagatacagtcagtctagactcgaaccaggaagagtctctaaaatctaaatgagtaactctaatggtctctctgaagactctgcactgttgcttctttaaagataaacattaaaatagaaacccgcatctctaataaaatatttgtctttcccagactttcttgagagtgagtctggagtgaccattttgtggtaacagatcatcatttggggttattatttaagcaccagttccctcatatttgtgctgtcagtcacttcctcaaagcttcccattcagtatgttttaacttaagactcagaaggacacattgatgataagaagtttctcagtgggtctgaagcttagctccaacactgcttgtcttagaatagagactttatcttactaggacaccaaagaagactgttactacatggcatgaatatctgcttcttctttatttaaaaaaaaaaagtgcagaaggcatcaatggataacattctctatgttttcatttgagtctagtagttttctgttcttactttgtactgtcaggctttttttccccttatatctaccttaaaccctataaagaactactacagatcagaaactttaaatgcaagatctgtaacttaatcaccagaaatataaaccagaaatatgactttctactaatttcctacttgtgaagtaagatgttctaagggataggcagacatgccagctctccttctaaagacagaatgtgtgttatacacgtggccttggcaattagaggtctgtacacaggatggcagcacttcattttcacatgcagagaaatggaatgttcaactctgttgggcagagcatagcttgtctcctattggcttatagccaggttaagaaagagcaagaatacactgagaatagaatatgttctccttcccagatagtatagatcattgatgattctaatggcaagaagaatggaaaagtccctgggagctttattcaaattcagctgaagcgtaagtccagggcttctggaggggtccatcacaagtctggggaaggagggggattcattttagttctcccctggttttctgctgatactctgcaaagaaaacgtacattcggaaaatgacccagtaacccattttccttgtttcaacggtgatgagtggccaagaaaaggatgtgatacagagttattcaaatctaaatgtctaggagagagaaatggccgttattaatgacagttatacagatggagctttgaattatttctgttggtacaagaagaaaacggggaaggccctaatatcttaatggagattcattcaaatgtggatagaaaacaggacagaaggctcactgtactgttgaataaaaatgctaaacatgtctccctgcatattacagccacccaaccaggagactcattcctgtacttctgtgcagtgagaacacagaactcttcaggcacctgcaacctgtactcaaacctgcaactgggagtccagtcacattctttgtctttgaacgggttttgggttagaatggtttaccataatgtgcttgtttctaaattgaaatgaatgcagaaatctaataattgtgattacaaaatcattacgtttaaagtaactcaaaatgagctggtatactttgtactaactccaatgtattcgagaggagaagtagtgttgttttaaatagatatgtaaataataaagataacctcattggaatatctgaggttgtttcattgagatcctacacttccataataaaacaaggacacctaaaactcttctgggtggcaatctgctggccttcagaaaaaaaaagaagattcatttttgaaaaaattttaaaatttttaaatcatcatattttaaaatcatcacacactcattatttattataagtattttcattccaggtgtgtctgcatatgccctaattcatagcaacttaacatatcaagtatatttatcatataacatttatgtccattctcctctggacatccaccttcatagtacgggtattcagtcataaaagttacaattcaaatagccaccagaagaattcctgcaaagatttttgtcttgcaactgttctacattcagaaaatatttaccaactgcctactctgtgccagacattgttcttggtgttgaggattgagcaggatgaacagaaagacatgacaaaatttaattgtattctgcttctctcctccaatggatgtctgctcaccagaaattaactggggaaacattttgatgacagtgtatatccagggatcaatgacaccacctaggagttttaggattttgcccaaattcaccaattccttcatacctcataggtctgtatgtacagtagcaacagtgtgatctttctcttttttccaatgttccttcaagaaaggaagataatagttattttagtcaaactgttcaaaatagagaaaaaaacctaccaactccctcatgaggcaaaaaacataaacaaaatctgtagagttaagagtagtgaggctgggcactgtggctcatgcctttaatcctaccactttgggaggccgaggcgggtagatcacttgaggtcaggagttcgagaccaaacttcccaacatggtgcaaccccatctctactgaaaatataaaaattagctgggcgtagtggtgtggacctgtaatctcagctactcaggaggctgaggcaggagaatcgcttgactctggaaggcagaggttgcagtgagccgagatcctgcctctgcactccagactgggtgacagtgcaagattccatctcaaaaaaaaaaaagagaaagtatttttcatataaattattctcggatttttgaataagtaataagtatacatggtataaaataaaaattatacaaaaagatatatagtgaaaagtaacttttctctttacctctatccccactatccccaacagcctagtataaccactgttacactgaaattttctttgaacattatacatatatacatatatatgatgtgtatatatatatatgtatatataaaaatgatgtatgtatatatgcttgtgggtatatatataacatatatattaatgtagcataccatccacactgttctgttaccatgctttcttacttaaactatatcatgggaaaccatcattgtcagtacatgaagacagctaccttattatttttaatctaaattttcaaacacacacaaactaggaagaattgtataatgaactcctttgtatctttcattcagctttaacaaccatcaactggctatctccttctctttaaagtttcaaattttgccattgtgtgactataccacattttatttagtcaatctcttgttgatggacacagattgtgttcaaattattagttttgtttgtattgtagcatagtttagtaaggtacacagatctcaagagtacagttcaatgagttctgacaaatgtatatgccatacaaccatcactgaaactaaaatatagaacatttcccataatcctgaaaactctctcatgtttcccccccagacaacacttccactaaagtaagaattgttcttatttacataaaaccatagaatagttctgtttattctattttgataaattgagatataattcacatagcataaaatccatgcttttgaagtataccattcagttatttttaatatcatcacaaatctgtgcaaccatcacaactaattcctaaactttatcatcactcgccaaaaaaaaaaaaatcatacctattataagtcactctcatcccctcctcagaacatctgcccctaacaacgcctaaatctgctttctgtctctatggcctatcctagatatttcatacatatggaattgtacaatatgtgacctatcatgtcacgtattgtatgattcacatattcacatattttactggctttttcacttaccataataatttcaaggctgaacatttgtgaccaagtttttgtgtggacatacgtttttagtatttggggtattatgcataaaaatggaattgtgggtcatatggtaattttatgtttaactttctgaggaactgccaaactatttttcaatgtggcttcactactttacattactgtcagcagtaagggaggattccaatttttccacattctcatttgttattgtccgtctttttaattagacccatcttagtaggcataaagtagtatccctctgtggttttcacttgcaattccctaatgactaataaggctaagcctatcttcatgtgcttaatggccatttgtgtacctgctttagaaaatgtctgctcaagtatttgggctgtttttaattgggttgtcttcttattgttgagttgtaagaattctttatatgttctggatactagacttttatgagacatatgattggcaaatagatgctcccattctatagattatgtttttttttttgctttcttaatagtgttttttgaagcagaagtgttctaaattttaatgaagtctaatttatctattttttctttagttgctggtgctttatatgtcatatttttaaaaacattgcctaatccaaggtcacagatagttatatctatgttttctaagagtttcatagtttcagtttgtacattgaggttattgctccacttcaagttaatttttgaatatggtgagaagtagggatgaaagttcattcttttgcatgtgaataataagacatttggagtccccaaccaaaagaaagctgggtagctatactaatatcagataaaattgacattaaaccaggaattattactagagacacagagcaacacatcaaaatgattgagtacgatctacccagaacaaattctatttttatatatacctaatggcgtagcttcaaaatatatcaaacataaatcagtagagttcaccagtagaattaaattggtagaatttattgattaaaagatcaataaataattatacaaccatcatgtcaggcattaacacacatctctcagtagaaaagtattgaaattatgaccaacacaactaatatcctttacctcacatacatagattgaatactttacctcaaaagaacagattacacaaggaatatttagcaaaattgactatattctgaaacataaagtaagccttaatcaatttcaaagaacttaaatcattcagaatagtcatagtctctgaccatatggtattaagcaaaaattcaataacaaaatgattattaaactttattcctgtaccttgctagatataaggttaatttttcaaatgtattgccacagaaaacaccaagacaaaacagagatttggggtagggtagatttttcagtctctgaatagagcaatgtaacatactacttgcacactttatttcctgtttgggggcagaaacactgaacttctccagggactttgcactcaggcactcagagaagcattttgtttccaggcttgagtgaggaagcaaatttcaaccgtaagaagaaattctaccatgctctgccctggcctgctgtgggcattcgtggtcccctttggcttcagtacctatgggcggccccaaacatgggactgcagcttcctcgagagctgggctgcacaaattggaactggtggagtatcaagtaagaggtaagggaagtggggaaatgaaacactatttaattattttctttgtccttttgccataaattaatctagtcctcatgacccatctgagacatttaagggaaccaactctgttttctcctttttcccataggatccagcatggctcagaaagtaacccaagttcagaccacagtaactaggcagaaaggagtagctgtgaccttggactgcatgtttgaaaccagatagaattcgtacactttatactggtacaagcaacaagcaacctcccagtgaagagatggttttccttattcatcagggttattctaagtcaaatgcaaagcctgtgaactttgaaaaaaagaaaaagttcatcaacctcaccatcaattccttaaaactgactcagccaagtacttctgtgctctcaggaatcccacagaagtagaaatgacagtggaagataaacaaaaaccttagcactccataaaggaagccacctgctcaggagcttagggaaaatacatgaagcacagacaggaagaaggcacattagtggcacagttgagaccttataatgtaaacattcctctgtaaaaaaaaagtttccttattgagtttatatataaagcagcattctttcttgcgatttccaactattacgtttctatcttgggttaaagtaaatcacaaagtgtattagtcagggttctctagagagacagaactaataggagagttgtatgtatgaaggggagtttattaaggagtattgactcacacaatcgaaaggtgaagtctcacattaggccgtctgcaagctgaggagcaacgaagatagtcggagtcccaaaacctcaaaagtagggaagccgacagtgcagccttccatttgcggtcaaaggtccgagagctcctggcaaaccactgctgtaagcccaagagtccaaaagctgaagaacttggagcctgatgtttgagggcaagaagcatctggcatgggagaaagatgaaggatggaagacttaacccgtcaagtccttccacattcctctgcctgcttttatcctagttgagttggcaactgattagatggtgcccacccagattaagggtgggtcagcctctcccagtgcagactcaactattaatttcctttggcaacaccctcacagacacacccaggaacaatactttgcatccttcaatccaatcaagttgacactcactattaaccatcatacaaagtgctttttaaaatcgttgctgaacaataagattaaatgaacctatgtatttcatgaaattcagaagcagtttgctgattctcatcttaaactgttgaatttccagatttgaagtagcactataaaccattttatcttccaatctcatgttgattttagcagtttttataaatattatcattttatttatttatatattttatatataaacaaatttcataaatacataaatttacttttatgtattttaatatataaatacatggtttttattgtattcagatagataagaaggcaattaatgttttgaaagaaatggatgaccaaaagaagctttgactaaaacaaactatgattgttagagatagaaaataattcttgggtgcttcataagcccagcagaaggtgggctgagaaaccaatttatccaccaaggcaggcatattccttaatatgtggtcaaaggagataagagaaaaagaatattccagaggactgagccagagaatgtaaaaaacaatgggcaaaataactccctgcatagagtgcagtcagaatctcatcaaagcagggtaggggtcttcataataatccaaaatgaactaggtatgtgcagaaaataattaacagtttttgtaacacactgagattttggagttgattattgtagcaggataacctagttactcaacttatctaaatacagagaaaaaatgagaaaatgttttcccaatttattttacaaggccagcatgattttgatactaaacctgaataaagaaatatttttgaaaaaattattatgggataatctcactaaatgaacataaattcaaaaattctaaacaaactattagtaaaaagaattagcagttataaaaaagaataacatatcacaaccaagttgggttttatataatctttatataacatcttaaatgaattaaagtaataattctcattaataaaaacatgatttaataatctcaacagttacacaaaagtttttaatacaaagtaaatattcattcataataaagagataaatttatggcaaattaggaatagaaaaaaaagtcctcattctgctaaattatatgtattacaacaaaacagacataaaacttaatgaaaaatgttgaatgctttatttcaagaaagccaaaaaaacgctatccctattaaaaaagtatactgaaggtcctaaccaatatttaagaaaaataaagaaataaaagttttaataattagaaacaagactataaatattagccacagatggcatgactgtgatatatacaattccaaatcatttgcaaatatatattacattactgagtttagctatgtagtattaaaaattacattttatatgaaagcaatcagaaattttaaatgaacctttaaaaagtgtccttaaaataggtggggtgaactgggggtggagggttacgcctgtaatcccagcactttgggaggccgaggtgggtggatcacgtgaggtcaggaattcaagaccagcctggccaacatggtgaaatcccatctctactaaaattacaaaaattagccaggcatgatggcccatgactgtaattctagccactcaggaggctgaagcaggagaatctcttgaagctgggaggcggaggccacagtgagccgagattatgccactgcactccagcctgggcgacagatcgagactcgtctcaaaaaataaaaataaaaaaataggtggggatgactaatgggtacaaaaaaactgcaaagaactaataggacctatcatttgatagcacaacagcgtgtctatagttaataataatttaattgtacattttaaaatcactaaaagagtacagttagattatttgtaacacaaaagataaatgcttgaggggatggatacctcgttctccatgatgtaaacttttttttttttaagaaagtctcactgcgtcacccaggctggagtgcagtggtgcgaccttggctcactgcaacctccgcctcccagattcaagtgattctggtgcctgtctcctgagtagctgagattacaggcaagtgccaccatgcccgggtaatttttgcatttttagtagagacagggtttcgtcatgttggctagactggtcttgaactctgacctcaagtgaacctcccgcctcagcctcccaaagtgctaggattacaggcgtgagccacatgcctggcctctatgatgtaattatgcattgcatgcctgtatcaagacatctcatgtgcctcataaatatatacacctacaatctacccacaaaaattaaaaattaaaaaatgtaacatgtatatatccttaaaatagcataaaaatacaaaatacttaaaaataaattttaaaagatatttgcaaggcctcaagacaaaaggctataaaacattaaaaaacgaaattaaagatctaaagaaatgggagaattcatcatgttcatgaattagaagatttacaatgcaaaggcatcaattctcgcatatttggtaaatacattcaatgaaatccccatcagtatcaagagtgtgtgtatatacaagtagattctaaaatatatagtttttaaaagtcagtaatactcaaagcactccgagagaagaagagcaataggaggacttcctgtccctgacaataagcctatgaaatttaaaatatggtatggaggaacaggaacacactcagttacagatctcgtcagctgtgtgtgttcctttttcctctcatatccactctccacctttctcttccttgctgtttgtctcacgaggctgacctgaatgaaccgcatcaacaaggctcccgtgccctctgggttctagtggatttttgccagtgaggtgccctttgccaaaatctgaaaaaggtagcagagtaaggtcagggtgtttgttccttggttctcctcctgaggaatctcttctagtggcaaacatcatttgttcaaagatcacagctcctttcaacttggctctctccacacacccatctccattcaggttttgatattcctctctgccctctggacatagggatagtaaaactccactggcctaaagataataaaattaaaatgcagatatttctcaaaaatctcatagagaaagaagtctgaggattcaggtaaatgggaatgtggtaatggaattatctgatgcaatttaatcagatgcctgctaaccatactccctgggaatcccagaggacccttctttcaccaaggaatcaggaaattcatcattgagtgggtcaccagaattcttaaaatatttcttggaggccatccaacctctatacagtgaaggcaatggggacggggtgggcacattgccatgtaatttgctttcctggatttcagtgggtgtgactggatcctgttgcgataggtagtggagtttaacagatagagacaaagatagagtttaacagatagagaaagagtattaatcagagtcttttaacattcagagatttttggagaaagctaattaatcatagaatacctaggaaggaaagacagaatcagcttcctgaggctctactttatattatctagattttttgaggaaaaaaatatagttttagtagctataatggagattaataggcccttaatcaatcccaattgagaggcctaaaacatctgaactgagggaatggttgcatccatttgagaaagattatgccagacaatatcaagcattggcaaggatatggaacaactgaagctcttatatatttattatgttggcgctaggaatgtaaaattgtgccaccactttgaaaaatggtttagcaatttttataaagttaagcatgcatatactgtatgatctaataatttgcacccatagattgttaaccagaagaaattaaaaatatatattcacagaagtatttatgcagaatgtatttgtgaatagaaaatattcacataatattgtttatttcttttggataaatattcagaggtgctttattcattataggtcataactggaaaaaaataaataggaatgagcaatttatatatacaataacatggatgcattttaaaaacattacatggagaaaaatgtcagatgaaaagagtttatactgtttgtatccattaatttgaaactcgaggaacagcaaatttaatccatattgagagaaaacagatcagtggttgtctggattctgcagttggggaacccagacaaccactgattgacaggtagagaacacagaggaacaatttagggtgaaataattgttctgtgtcttgatttatacaacagttacatgttctataaatatttcaaaactcaccatatttcaaagcacttaaaatgggttcattttactgcatgtaattcatacctcaataatgttgatttttttaaaagaaataataaatattgctacatgccaaccaaaatgtctaaaattaaaaaagaaagacagagctaagtaatgaagagaatttgaatctactcaaacaagtaagagtgtaaattgataccaatacttaggaaaattgtttaacactaatttctcaatttgaatcataactaatgaaaattattttttaaaaagccaaagtctgggaaatcgtcctaagggcataccaaaaatggagaagcatttattcaagaaaatctactgaatctactaaatgtcagcaaacaaaaataaataagatgtgatatatatgtatacacacacacatataatagaatattattcagcctaaaaaggctgtttttatggatacaggttcctttttgggatgaggaaaatgttctaaaattgattgtggtgatggctgcacaactctgtgaatatactgaaaaacattgagttgtacactttaaatgggtgaattacatggtatgtaaattgtatcttaatgaagctgttacataaaaataaaaaagcaaagcaaaaggtaccacaatatttattgttcttttctagactcagtctggattctccataccatttgaatattgcagtaatgaacactatatgtttgacttttgtataatataactagataacatagagacatctacatttcatatttcttttcacaatcccaattttttaaacctatatatttataccagtactgaattattagtgtcatttttaatctgacacatatataacatgacacagtgaatagctgtcaaattaagtgtcactatatggctattgtgtcatatatggtcatattctaataaccagtctttatgtattatagatttgtgaatttttcttttttggaggatggagaataaggtttggtgtgctatttgaattttgctcacagatctaatctggcattttcacttttacttttagatagttttgttcaatttgttttcaaaaaaattagaagctttttgggggaacaattgcaagagtcattccatataattcctcccaataatgttatgagtaaataaaaattaatatattcacccaacaaattaagttctcaatctgtgccaaatcctatgctatacaatgagtaacatgagctttgggaactgccttcaaacatgtgaagaaccagataccacagaaaacaaaaggaatacattaattgagaaaacatcacataaataattttggggggggcttcctttattttattttattaaaaaaattttaaataggtttttggggaacaggtgctgtttggttacatgaataagttctttagtggtgatttctgagattttggtgcacccatcacccaagcagtgttcactgtacccaatgtgttgtcttttatccttcaccactcccacaccttcccccgagtcctcaaagtccaatgtaccattctcatgcctttgtgtcttagagtttagctcccacatatgagtgagaatgtacgatgcttggttttccattcctgagctacttcatgatatggtttggctgtgtccccatcaaattctcattttgaatttccatgtcttgtgggagagacctggtgggaggtaattgaatgatgcgggcagggctttcccatgctgttctcatgatagtaaataagtctcataagatctgatggttttaaaaggtgttcccctgcacaagctgtctcattttttgcctgccaccatccatgcaagatgtgacttgctcttccttgccttctgccatgattgtgagacttccccagccaggtgaaactgtaagtccaattaaacctctttcttttgtaaattgcccagtctctggtatgtctttatcagcagcatgaaaatgggctaacatagcatattggtaccagcagagtggagcattgaagaaaagatgcttgaaaatgtggaagtgaccttggaactgggtaacaggtgcaggctggaacagtttggagggctcagaagaagacaggaaaatgtgggaaagtttggagcttcctagagacttgttaaatggctttgacaaacatgctgatagtgatgtgaacaatatcatcttccaggataaggtggtctcaggtggagataaggaacttgcttggaactagagcaaaggtgactttgtcatgttttagcaaagagactgttggcattttgcccctgccctggagatttgtggaacattgaacttgagagagatgatttacagtatctggcagaagaaattcctaagcaccaaagcattcaagaggtgacctgggtgctgttaaaagcattcagttttataagggaagcagagcataaaagtttggaaaatttgcagcctgacaatgcaatagaaaaggaaatcccattttctgaggagaaattcaagccataatgaagatccaaatgttaatcctcaagacaaatggggaaaacgtctccaggttatgccagaggtcttcacagcagcccctcccatcacaggcctgaaggcctcagaggaaaacgtggtttcatgggctgggcccagggtcctcatgctgtgtgcagcttaggaacttggtgctctgcattctggctgctccagccatggctgaaaggggccaacatagagctcaggccatggcttcagagggtgcaagcctcaagccttggcagcttccacttggtggtgagcctgcaagtgcacagaagtcaagaattgaggtttgggaacctccacctagatttcagaagatgtatggaaacgcctggatgtccaggcagaagtttgctgcaggggcagggctctcgtggagaacttctgctagggcagtgttgaagggaaatgtgggattggacccccacacagagcttctactggagcactgcctagtggagcagttagaagagggccaacatcctccagaccccagaatggtacatccactgacagtttacaccacacacttagaaaagctacagatactcaatgccagcctatgaaagcagccagtagggaggctgtaccctgcaaagccacaggggtggagctgcctaagaccatgggagcccacctcttacatcagtgtgacttggatgtgagacatggagtcaagcgagatcattttggagctttatgatttgactgcaccgctggattttggactcgcatggggtctatagcccctttgttttggccaatttctcccatttggaatggctgtatttacccaatgtctgtaccctcactgtatctaggaagtaacaaacctgcttttgattttacaggctcataggtggaagggacttgccttgtctcggatgagactttagactgtggacttttgagttaatgctgaaataagttaagactttgggggactgttgggaaggtatgattagttttgaaatgcaaggaagtgatatttgggaagggtcggggtggaagtatatggtttggctgtgtccccacccaaatctcatcttgaattcctatgtgttgtgggagggacccagtgggaggtaattgaataatgcgggcaagtctttcccatgctgttctcatgatagtgaataagtctcacaagatctgatggttttaaaaagaggcattcccctgcacaagctctctctcattttttgcttgccactatccatgtaagacatgacttgctctttcttgccttacgccatgattgagaggctttcccagccatatggaactataagtccaattaaacctctttctttgtaaattgcccagtctcgggtgtgtctttatcagcaccgtgaaaacagatgaatacacttcacttagaataataatctccatttccatctacgttgctgcaaatgccattattttgttcttttttatggctgggttgtattccatggtatatatataccacattttctttattctgtcattgattgatgggcatttgggctggttccatatttttgcaattgcaagttgtgctgctgtaaacatgcatgtgcaagtatcttttttgtacaatgacttcttttcctctgggtaaatacctagtagtgggattgctggatcaaacagtagatctacttttagttctttaaggaatctccacactgtttttcatagtggttgtactagattacattcccatcaacagtgtaaaagtgttcccttttcactgcatccaaaccaatgggtatttttttaaatttttttattatgaccattattgcaggagtgaggtggtatcacattgtggttttgatttgcatttccctgataaataatgaggttgagcatttccagatgcttgtgggccattggtatatcttttctgagaattgtctagtcatgtccttagctcactttttgatgggattgtttgttttttcttgctgatttgagtcattgagttagattctcgatattagtcctttgtcagatgtatagattgtgaagattttctcccactctgtgggttgtctgtcaactctgctgattgtttcttttgctgtgcagaagctttttagtttaattaggtcccatctatatatctttgttcttgttacatttgcgtttgggttcttggtcatgaagtctttgcctaagccagtgtctagaagggtttttctgatggtatcttctagaatttttatggttttaggtcttagatttaagtccttgattcatcttgagttgatttttgcataaggtgagagatgaggatccagtttaattcttctacatgtggctagccaattatcccacaaccatttattgaatagggtgtcccttccccacattatgtttttgtttggtttgtcaaagatcagttggctgtaagaatttggcttcatttctggcttctctattctgttccattggtctaggtgcctatttttatactagtaccatgctgttttggtgactatggcattagagcatagcctgaagttgggtaatgtgatgcttccagatttgttcttttttggttagtcttgctttggcaatgtgggctcttttttgtttccttatgaattttaggaaataattctaaaaccccaaagtgactgaaaataatttgacctttcttagagaattatggtaggaagctctttgctgagccttgtcactagagggaggtagcacatccaaaataatctatctttagacctgaaacacaaaccctgaaagattgctaactgacttggttcctagttctatgtaaaggagttcacatatacagtcacaagagggagctgttacagctgcaaatccaagctccttccagggtgagcgaggttgtcattgagttgtataaggaatttatgttcattctttttgccaccttgtgctttattatctctttttgagtgtgtgcacagtttcaaagacatgggtaagccccttcccaaatgcagagcagaagtgaccctgaatgggaaaaacagagaagtgattaatacatagctcaattttaaatggtgaaatatttgttgctataatggactgacaagcttagttattgtagcagagataatgagtaattttaattttattccttcccatttctttaataaccacttttgaaaataactagaaaaaccccttcatagttacttctacctctcttatcaaatggcatcatttgatttccctctccaaacctcttcccatttcttcctttctccttcaatgtatgccactcctaggcatcatgaagatgagaaagcatatgttaaagaggagttcaagtggcatagaaataggggtcattcaagccattggctcctgtctcaaaaccagaggcacaggcaatgtctatctagaagacacttaggacattattccaggagccagtgtgggagacctgagtaccaggaaacttggcttctaacctgagttctaaatttgttctttcctttcacacttagcacagcaatattatacaattatgaaattacttttgttatatatgttgcaaataccttctttcattgtgtcatttgattttcaattttgcttatggtaattttttttaccaaaaagaagtttctaactgttgaaattaaattatatgctactgcttcttctaagacttactcgccctgaagatgtggatagaaattcccttctttcccttacagcacagggctcacatagacttcttggaataaagggctgttcttaccagctcaatgggttgtcaaactaccaattaatggtgggttttgtccttaccataataagggatgggtaatcccatttacttctttagatgtagcctacttgagtttcagccttgaaaatgatcttaatggaaactttctgaattaaagctagatttaaagaaaatattcttcccctctttttaaagttttatttttttaattaacaaataataatcgtattttatcttcttttaaaatgtatgtttaaacctgggggtgggctagacctaaccaggaagctgctctatctttagctgacgatttctggggagcactcaaattgaaacctgcctgatgtgggatgtgctgtggctgctgctttgttgcttgggacctcctctgacctaggatcagacacagagtctgagttctggggcctggaacctcaatgtgcacttgaacaatgaagttggtgacaagcattactgtactcctatctttgggtaagtgttctgggcctaagaaagcatagttttgtggctaatgacaaaagagagttatctgctgtctccatgttttctaccatgatttaccaattgcgggaaaaaatttgtttctatgtgtttcttgagggtgtctgagcgtcagtgtgaggggttggtcatatccactactcagagaagattctccaggtctcacagctctcaagctgtaaggagttttaggttcattgagctcaagggtcatggaagatgggaaatttatttttggccttgtggctctgcatagctcaggaacaaataaataccagtaatatttatcttgtcctgtgcaacacacataaaaacactcaaatatggagtagggcagggaggacagttctggagcagtggtgaacctgaccttcagatgcaccaagagctgatgatccagagctaatctgctgtttttcaaccccataggtattatgggtgatgctaagaccacacagccaaattcaatggagagtaacgaagaagagcctgttcacttgccttgtaaccactccacaatcagtggaactgattacatacattggtatcgacagcttccctcccagggtccagagtacgtgattcatggtcttacaagcaatgtgaacaacagaatggcctctctggcaatcgctgaagacagaaagtccagtaccttgatcctgcaccgtgctaccttgagagatgctgctgtgtactactgcatcctgagagaccacagtgggacagatggggctgcagctgtgcaatatctccctggtgatgaaagggaaggcatctaacgaggccactgcacaagaaggagcagaagtttaatagaggaagaagaaaatttaaagaagaaaagggaaaagaagtaaagaggaggtggtaaggaaatcaatgagaggatgagaggattaaaggaatgaagaaactgagaaagaatagctaagaagtcctgaagaaaggactgagaagcttggcgaagagatgaagaatcacaattggaattctgcagtcaggaagaaaggaaataagaattttcccggacgctttcttttaatcaactcttgctttccatgtagacctcactataaaagatgagaaccatcatctggtagtcccaaagcatttcttcatctagccccaggcaagtgcctgggctttgaatattatatcacattagtccttccaacctctcaataattgaaatgaatttcagaaattgattcatttgcccttacgaaaaatttgaaattttatttgttactcatccatagcacatactcttgggatatagatgatttctggaagggagcaagaaagtggtggatatgtgaatattgatttcattttttaaatctatgttgaaatatctctattattaaacaaaaatacacaaatcttttttcattgtaaaagattcaaactattaagtatgcgaagtaaaaccttagaggcccaaactgactgtctccatctccatcccattttctcttcaattcctacaataacccattttgacagtttggagagtgccctgatgatcatactccttttcatttatgtggatactcacataaatatctacccaattttattacataagttggaacataccatgtgtatctgtctgcaacttgcttttatttttatttaaaaatagttttttgaggtgtgttcataccgagatacatgtgtatgcatgtgtgtataaactggccttattcttttcaatatctacaaatgttcacagtatggttgtataataattttacttacctcacctatatcatctctacatatataaatatatatgacatatgtgtatgtgtgtgtgtatgtgtgtgtgtgtacatattccttatagattccgaagtggaattactggatcaaaagatatgcctattttatatttttatagatattgaaaagttgcattccaaaatggctttaacagtctaacccaagatcaggaacatggcaaaaatgtctactctcaccgtttctattcaacattatcctagagaatctaaccaatgcaatgagacaaaaagaaaaaggaaaccaggctttacctattacagatttgtgaatttttcttttttggaggatggagaatgagggttggtgtgctatttgaatttttcccacagatctaatctggcatttgcctttactttggatacttctgttcaatttgttttcaaaaaattggaagcttttttggaataatttcaagagtcgttccacataacttctcctaataatgttatgagtaaatagtaattaatatattcacccaacaaattaaatctttaatctgtgccaaatcctatgctgtacaatgaatgacatgggctttgggaactgccttcaaacatgggaagaacaagataccacggaaaacaaaaggaatataataattgagaaaacaacacagaaataattataaaagctccgaagtgactgaaaataattctgtctttcttagggaattgtggtagcaagctctttgctaagccttgttcctagagggaggtagcacatccaaaataatctatctttagacctgaaacacaaaaccctgaaagatcgctaacttgactttatggtaaaggaaaccatatttaactttttaaaacgtaactatcattttgcaaacaatagaattgtctgtgtagcaaatcctatagacaaaaaaactactgtaaccaataaatgagttagataaaattgcaagatacaagctcaatatacaaaataatgctgcttccatacagtaacactaaacaagcagaattgaaatttatatagatatgcatatgtatatttatgcatttatatatttatgcatacatatgcataaaaaacttttaacaaaattttagcagactgaatctaacaatatataaaaaggataatacataataatgaagtggggttcgtctcaagaatgcaatttatatgtatatgaatttcaattctgggccaggcacaggggctcatgcctgtaatcttggcactttgggaggctgaggcaggcagatagcttgaggccaggaattcaagactagcatggccaacatggcaaaaccctgtctcgactaaaaatgaaaaattagccaggtgtggtggcacacacctgtaatcccagctactcaggaggctgaggcacgagaatcactggaacctggggggcagaggttgcagtaagccaagattacaccactgcattccagcctgggcaacagagtgagactctgtctcaaataaataaataaataaatttcaattctggcgtgtgtgtgtgtgtgtgtgtatgaatacacttgacagaagttgtctaaggcctgtacactaaaagatataaaaaaattctgagatacatttaagatctaaataaatggaaagagttattgtgtttgcagattagaagactcattaaaattctctccaaattgacctacagattcaatgtcattcaaatcaaaatcccaacagaaattttcatagaaattgacaagtgggtctaagatttatatgaaaatgccaagggactacaacaaaaaaattctttttaaaaaacacaaattgaggaacttacactactgatatgaatacttttatagttacaataatcaagagactatgatattgatataaagatagacaagtagaacattggaacacaataaaggatccaataataggccagcatgtacatagttgattttcaacaaaaataccacaacaatttgttatgaactgaatatttgtgatctcccctgcaaattcatgtgttgaaatcctaacccccagtgtgatggtattaggaagtaggtctttgaggaagtgattaggtcataaaagtgtagccatcttgaatgggattagttccattcagtgaaaccctagagaactttcttgttctttctgtcatgtgaggacaccacaagaagactgccatctatgaaccaggaagcaggccctcaccagacatgagatcttccagcccctcgatcttagacttcccagccttcagaaccatgagaaataaatttccattgttttagtcacacagtctatggtattttgttatggcagcccaagctaacaaacacaatctcaaaataaatatgctgaaagaaaccggacgacagaaagcagatacggtatgattctgtttacataaaactctagaaaatctatagtaagagaaggcagactagagattgcctggggttgaataggcattgggatgatatattggaaaggtatacagaaaggattaacaaggaacacaaggaatagagacacaaggaaactttggggagtggtgcatatgttctttatcttgattgtgatgatgatttcacatttgtatgaccatgtcaaaaattatcatattggaccttgtaaacatatgtaatttgttatatgcaaagtgtacctcagaaaagtagtttttaagaaggctcaaaacaaaagtagacagagataaatattgaaaaataatcactctgtactatagagaacagaattttttactttctcttaattatggagggtaaactttctcaagcatgcaagggtaacatatgttatgagattatattttctttatctcataagtggcatattttaatgcaataaatagatctatgtcatatataaattaactccagaaaacctgtccattattcagcatttctcagtctggccaaagagtggcagtgttaaaaaagtatttgagtaagattgtacagtgctgaacaaacaggaatccaggtatggcttctgattggtgcaatctcctgcaccaatgagcaaagtaacttctgctggggaagctcattcagtaaaatctgatttaactgtgttttctaaatagctaagggatggagactgttctgcaagtactcctagggatattggggttccaagcagcctgtgagtatgtggttagtctgggagaattgcgagatggtgacagcatcctgagggcaagagtcgagtcatcttctgttctgggaaggcccgtttgagagccagatatgtgttgggaaaaaaaatgacaatactttgttttaatgtgacaattctgctgcctaggggaagtggggagggggagaaaaacatcatccctaccatgaccatgaaaatcttatgagggtcttctgtattttctttacattgtctttttgaacaggggtcagtagccaagaactggagcagagtcctcagtccttgatcgtccaagagggaaagaatctcaccataaactgcacgtcatcaaagacgttatatggcttatactggtataagcaaaagtatggtgaaggtcttatcttcttgatgatgctacagaaaggtggggaagagaaaagtcatgaaaagataactgccaagttggatgagaaaaagcagcaaagttccctgcatatcacagcctcccagcccagccatgcaggcatctacctctgtggagcagacacacagcgatcttcaggcctctatcagctgtctccaaacctgcagctgggccacatatgctcttctgacatggggctcctgagatgtggctgggacctttgccaagacatgaagtctcagaacgttgcaattgtcttattggaaaaatggggaggagagtaggaatgatacaagggggagctatatcactaatcccaaatttaatttgactttattgtctggtagttatgttactttttagtagatggaacatcaaattcgaatgagaatagcatgaatttcagtgatttatgcaagaactatgcacgaatattatgtccctgttgtgccaaggaacttctttccctttgctatttacccaccttgttaataaaaagaaattgtgcattgtttgtcagattctttgtcacagattaacattgtaccaagagtgttagaatatccatactgaggagtcatgggcaatagttttttctaagtttgtagtatagatatagaaaaagacaaatgtttagacagataaataggtgatagatagattataggaagctagattattagatagatgataggtagatagatagataataggtagattagatagagtgagctagagagaggggaatatattaataaatatctaatgcagtcttagactggcctccacttctcttctcattgtgctttcattcatattctagtctcagtattcttctggccactccaaattatcagcttaaagaattgtttcccagttgtctcagtatgaagtggagaagatgttaccttcatcctccactccacatcagaatagtgctggcctacagtgggtgtttacaagtattaaactgatactgaataactgataagatcataggttagagagaaataattcacatgtttcttaaaagctatgtgatgttgaccaacaactttaactttacaagtctttattttccctctgtaaagatgatacaatcatattattttattcatatgttcttgttaggatgaagtaaggttatagattacatacattaagtatctggtgtattgcaagccctcaatatttgagatagtatttttactattaatcaaacaatgacaatttcaagcaagtcaaaattctcacataaaagtagggaagttgatcaacatgatatggcttcaacctaactaggagatgttctattctttaaatttagaaaagaaaggaggaatataatggtctcctgtcatcagaaactgcctagtgacctggtttcaaaagaaattgcatgtaaaatgggaatgatcatttatgttggccaaagtcagggaagatttttaaaaatcaagtcgaattagattattttctgttttaaagaaatgttacctataccacccactgggagaaaagtttgctaaaataaacaggaaagagagaaaagagagaagcccatgaaagaaaatgtttggcaacgtgataagaggaaaagcaagcaggaaataagaacataagtttctgattttcatgaaatgttccgagtaaagtgacacttacctatgtgtgtaaatatgcatatacatatacaaatctcaaactaaagagtgtacatatttgcattttaacctaaaatcaaatttttctaattggaaaataatataaagatattgtctccagtagaatgctgggaatattaagggttgaaagtatgaagataagtagtcataaggatgtttagagattaacctgccatgtcccacaaggctggtaaatcaatgttatcaggagaaagaaactgttaaattcacatcagcgtcttaggtcagcctaagcaaataggttatatgacatgcaacttacccttctcctctttttttctcccccatcaaaagccaatttcctattctgagaaaataattcaccttctccagtgattctgcctcagaatgtccagcaaactgaacaaggctgagctccagacattggttttgattctgggcagcagaaatttccctatgggagaagatgccagcatgacttttcctagtgtgcaatgagcagcgaccagctctgtctacctccttagggatagcccctgataggaatgctggggttgagcaagaggaagagtgagtgattagaagaaagaaggcaggaaccaagtttcttttcctcctgccttgagtgcaaggtttagttccttttctaacagctcttggcaattccattataaatcaggtgaaagaattagtctgatttttgtttgtttgtagggcctagcatgtcatagaaagccactaaattctaatcagcaatatctggacagtaagggagattgtgaacttagttttcttacaggacataggtattataattattattgtggtaaaaatttcctcctagcaggaagataatttttttgtgtgctttgggaatcacccaaaagttttccactgcaaaaatcaatggaataaggaactgatattttctaaaccttcagtaagtggctaaatctatcaggcttatctattcatccccatagtgagaattccttgcaatatgtgtttgtggcattcttatagataccacagtcagaaaaaaaggggatggattaaaataagcagaaaaatttgctacattctgtgctaactttaaccccatataaatgctgtcttataagtagatctattaaatagggccatccatagccacagcctttcatattttaagtaaatatcacaacataatattttcatcagaaaacttgtctccaatttctagagccttttgttactcctggcactatcttagtaggactttagtgtgccagatatgagcctgctagatttaagtcaaataatgatttattcttatgccctcttctcaactgtgttgatcaaattcataaaacaaatgttagccttaaattccttacttcacttccttgtcttcacttcctctgggacatagtcttgtcttgtctagtctagtcttatgctgcagccttgacaacttgccaagataaaaagttgagagttacgatagtagaaagaagagctacagagaataaacagaatgagaaagtataaaatatgattaaatggagttccagaaagaggagagaggtgaatgaggcagaaacaatatatgaagagataatggatgaacagtttttaaaaaatggatgaaagacatcaattcacaattcaagaagacaaaaacattcctgggcaatttatataaaaagaagtgtagtgtgtgtgcatgcatgcgtgcatgtgtgtgtgtgtgtgttcagagtaaaacagcagaaaatcttaaatcaagaagaaaatcttaaaaatcaaaggggagggtgaaaaagactgttttcaaagaagtaaactgacagctgacttctcaaaaataacaatggaaaccaactgagatttgaattatttttcaatgttcagagagaaaataactaacatcaaattttgtataaagcagagcaattcttaaaataagaaataaaagcatttaaagaaaatctgcagaatttaacggtatattttctctaaaggaaactccacaagtagatggaaaggatgagggcctggattatactgcacctgccacctgtgtggttgtgctcaaagaacagaacctctttgggatggtttctaaatttcaaaataaagatgaggtattctcagctagtctcactgtattttattaattgaaacaccatatgtgaaacagaagactctaatgcaaacgtaaagagatttgttactaaaaccttaggccaagctttggatgttcttaaaagggcaatggcaggaatgagaatggggaaaatgatctatcctcagtgagttgtaggacttagagaaagcctcaagggctgtcatgtgttttatcatgtcctgagaaacaggtttacaaatattagcacctccttactgtgctggataattctattcggtttcctccagcagtttgtgataccccctatgtgtagagtgggtatgtagggggcaaacaaaggactcatctgttcttgctgccggcaagctgtagccacatccagttggctctcacctcccaaatagcttcaaagagaagcaaatcatattcaacagtttttgtggcagaactcatcctgcagaatttttaaaaaacttgttttatcttatggcctttgataaaagttctgaacccagggccagttgtagcagaatatggacatatgaaaaatctgcctttagtctcttgccattccttcaccattgcctcccacctattctactgctcctgctttttacccagcccctagtagtattctatgatgttttaatactgttagcctgcccaaagcctgatatttctagtcactgaattgctcttcagaatcttctcctacactattgagtagatatatatctctctccactcaatctctaaaataaagtggtttatagcctaacttactctcaatgtaatgttctaggttaggtctccctggactgtttgtatttgaaaaagagatgtagaggagattccaagaaagtctcctcaaagatacattctcagttacggtggcagttggatagaaaagatgtttttattgtaaaatactctttcccacacttctcagccatagtgtaggctgccagtgtttggtcagttcccatcagcaggaacacaggcaacatactgttagcaattttttttttttttttttttttttttgagaaggagtctcgctctgtcgccaggctggagtgcagtggtgccatctcagctcactgcaatctctgcctcctgggttcaagccattctcctgcatcagcctcctgagtagctgagattacaggcatgtgccaccacacccagctaatttttgtatttttagtagagacagggtttcaccatattggccaggatggtctcgatctctttgtcagcagtttttaaaacatatgtttttattccaattattttagaaagataacataattcagaggaaaaaattaaagattctattgcttgaaaatacatagaacaatattctatttaactacaccttgtctatgtttagatacacaaagactcaccattgttacaattacctagagtattcagtacaataacatcctgtgcaggtttgtagcccatagcctatcgtgtagcaggctataccatctagaccagtacgctcttataatgtttgcacaatggcaaaattgcctaatgatggatttctcagaacgcctgtagttgagcaaggcatgactatatcagtaaaacttctacatgaaagaataggcaggggaactagtttgtctaagaaaacatatgaaaatttaactgtttcagaggcagcacagtcaaaaaagtaaaggtttgtaatcttagatatcactcaaatactagtcctcctacttccaaaccagataaccttgggcatgtgactgaatctttctgaacttagattcatctgaaaaatgaataccatctatttcctagagtggtaaagagtcccatatgctacgggacttaggattgcttaggattgctaaggatagctttggctattcaagctcttttttggtcccatgttaattttagaattgttttttcaaattctgtaaaaatgaagttggagatatatgagataaacaatacacattacctgccacatattaactaatatatataacaaacattatgtaaatgacaaagagtactaggtactcccaggaccttttatgatcctcagaatatttttttgaggtaggtattattatcttgcttttattgatgagtaaactgattttcagagaagttaagtaacttgttcaaagtcatgcaattaagaagtggcagagatgtggtagtttttgtgatagaattcttttcctttccctgcctgttgaacggtctgcatttagacatttctttaaattattttcagtttctttcccttcgtccccacaaagagcactaaaggtcatggtaaggtaggatcatttgaatcatgttatgatcttcctaacatgaatgactcctggcttttccagttaacaggtagtggtccattatgctgtggttatattttctgcatgtatgatgatataacgtaactggccaggcacagtggctcatgcctataatcccagcacttttggaggctgaggcaggcagatcacctgaggtctggagttcaagaccagcctgaacaacatggagaaatgccatctctcctaaaaatacaaaattagctgggtgtggtggcacatgcctgtaatcccagctacttaggaggctgaggcaggagaattacttgaacccagcaggtggaggttgtgctgagccaagatcataccatttcactccagcctgggcaacaagagcaaaactctgtctcaaaaaaaaaaaaaagaaagaaagtaaccaaaagactgtcacttacttgccccatgacccctgttacatagcctttgaacctcagtttgtcatagaaaaatgaagaaaatagtctctcccatcctattgctttttactgtattaaatgtaaatgtatatggttctttaaatgttatgtattattcagatttattacaataattgttatgtaaatgacatctatctgataatagaatgaggtctggagttcaagaccagcttgaccaacacggagaaatgccatctctactaaaaatacaaaattagctgggtgtggtggtgcatgcctgtaatcccagctacttgggaggctgaggaaggagaatcacttgaacccaggaggtggaggttgtagtgagccgagattgcaccatttcactcctgcctgggcaacaagagcaaaactctgtctcaaaaaaaaaaaaaaagaaagtaaccaaaagactgtcacttatttgccccatgacccctgttacatagcctttgaacctcagtttctcatagaaaaatgaagaatatagtatcttccatcctattgctttttactgtattaaatgttaatgtatatggttctttaaatgttatatattgtttacatttattacaataattgttatgtaaatgacatctatctgataatagacacagcatattactctattaactgcatatacagtaaaaacacagtatagaagattttaagataatctgtgtctatttttgtatcagtgacatgctgtttgggttactatagccttgtagtatagtttggagtcaggtaatgtgatggctttgttctttttgcttatgattgctttggctatttgtgctttttttgtcccatattaattttagaattgtttttttcaaattctgtaaaaatgatgctggtaatttgataggaattacattgtatctgtatattgctttgggtagtaattttaattatattgattgttccaatcagtgagcatgaaacatttttttatttgttgtatcatctatgattcctttcatcagttctttgtagttctccttgtagacatctttcatctctttggttaaaatgtattttctaagtattttattatttgtatgtgtgtatatcataaatggaattgagttcttgatttttttccttagcttggttgttattggtgtatagaaatgctactaatttttgtatgttgattttgtatcctgaaagtttactgaagtcatttatcaagtctaggcatctttcagaagactgtttagggtttcctagatataagatcatgtcatcagtgaatagagataattttagtttctcttttttaatttggatgccttttacttctttctcttgcttgattgctctgcctaggacttctggcactatgttgaatagaagtggtgagagtgggacatccttgtcttgttcctgttcttagagggaatgctttcaaattttcctcattgggtatgttgtcatggatgacccttatttgtcatagttttttttattattttgaggtatgttcctttgatgcctagtttgttgagggtttctatcataaaaggatgttgggttttattgaatgctttttctgtatctattgagatgatcacatggtctttgtttttaattctgtttacatggtgaatcacatttattgatttgcatattttgaacgtagaccaatggaacaaaatagagaacccagaaataaaaccatatacctacaaccaactgatctttgacaaagtcaacaaaaatacacaatgaggaaaggacatccaattcaataaatggtgctggaaaaactggatagccatacacagaagaataaaactgaatgcatatctctcaccatattcaaaaattaagtccagataaaataaagacttacatggaagacctgaaactacaaaaatcctggaagaaaaactaggaaaaactcttctagacattgaactaggcaaaaaaatttatgacaagatctcaaaagcaaatgcaacagaagcaaaaatagacaagcagtacttaattaaactaaatagcttctatactgcaaaagaaataatcaacagcgtaaatagacaacctacaggatgagagaaaatgttttcaaactatcaaccaacaaaggactaatatcctgaatctataaaaaaactcagacaactcaacaagaaaaaaacaaccccattaaaaaatgggcaagggacatgaacagatatttctcataagaagacatacaagcaaccagcaaacatgtgagaaaatgctcaacatcactaatcatcagagaaatgtacatcaaaaccacaatgagataccttctcacaccagtaaaaatggctattattaaaaagtcaaaacacaaacagatgttggcaagaatataggaaaaaaaagaatgcttatacactcttggtgggaatgtaaattagtacatctatggaaaacaatatggagatttctcaagggattacaaatagaactactattcgacccagcaacaccactgctacccaaaggactacaaatagagctaccattcaacccagcaacagcactactacccaaaggaaacaaaattgttatgtcagaaagacacctgctcttgtgtatttatcacagcactatttacaatagtaaagtcatgaaatcaacctaagtgtccatcaatgtattattgtataaagaaaatgtggtatatatacactgtggactactacacagccataaaaaagaataaaaccatatcttttgcagcaacatggatttagcttgaggccattatcctaagtggaatcactcagaaacagaaaataacgtactgcatggtctcacttataactgggagctaaacaatgggcactcatgggcatatagagggaaataatagacagtggagattccaaaagggggaatgatgggagggttgaaaaattacctattcagtacaatgttcaccattcgggtgatgggtacactagaagcccagacctcaccattatgcaatatatccatataacaaacctgcacacaaatgacctgcatcgtagtaacagtaataataaatatcaaaattatatgcttgtctagggcacttacaatgaatggggcttgcaggactggaaggtgctctgtgtaattcagcaagtgagtaagaggtcagtgaatgtaaaagcctaggacaatattatacactgctgtagactttataaacactatatacttaggctacagtaaatttgtttaacaataatttcattttctcaagaataagttaaccttaccttactgtagctttttttactttataaacttttaatttttttaactttttgtctctttcataatagcttgaaacacaaacacattgtatagctatacaaaacaattttcttttttatatccttatttatatccttttttatatccttattcttttttaatttttttttctattatttaaacttctgtactaaaaactaagacacaaacacacatattagcctaggcctacacagagtcaggatcatcagtattgatgtcttccacctgcacatcttgtcccactggaaggtcttcaggggcaataacatgcatcagctgtcatcttctatgatagcaatgtctttttctggaatacctcctgaaggacctacctgaggctgttttacagttcagttctttataagtagaaggaatatactctaaaataactattaaaagtatagtatggtaaacacacaaacaggtattaccgtttattactatcatcaagtactatgaactgcacataattgtatgtactatacttttatatgattagcagtgcagtaggtttgtttacaccaacaacaccacaaacatgtgagtaatgcatttgtgctacgattttacaatggctataatgtcactaggtgatagcaatttttcagctccattataatattatgggagcactgtcataaattgttgatggaaataccattatatggtgcgtgactgtataataaaacctgttccagtttgaaccattggccagagacaccaacagacacaatgtaatcaagatgtagaccccaatgtcagccttctagacacaaatgaaacaacacccaacttagctcaagaacactttctaaaagcaggaggctccagttccccaatctgtgggaacaaggagaaccacagtaagtgaagaggaaaatcattatctctgaacttgtcagaagaaaaatcccatcaaggaatgcttttgagaacttgaattctagggaagcccactggaggccacagccactacagaaatatagaggccacagcttcctgacatgcggtgaggccacatctccactcacttcctgtcagtaggtgtcacttgaacaaattttctcatgtcctggccagtcacctggagcctggaggcatgtcttactttgcatacacctctgtcaaaatgcgtatcagacaattatgttataaattgaatgtcttaggtgttacagagtaggtgttgtggaatgaatatttgtgtatcctccaaagcgcactctctctttctctcacacacacacacatacataccccaaggaaaggccatgtgatatcttgattttaaacttccagcctccagaactgtgagataacaaatttctcttcgttaagccactcagtgagtggtatattgttatggcagcccaagtagactaatacattaggttattctgctactgacccaccttactgagctagacctactttggtccccacatgtctccccagggacactgtacgaagcctggagctatgtcagtttttctgtactcaaaagtagtgccctcctatatttacctcttgtttgttttattggagttcctggcaggtatctcccttctctttgaactgtaaatagaaataatccttctttttgaagtaggattttctttctgaacaagcttataatttcctaccattgatcttcttgcatggcaatttcaattaaaaaatcatttgaataattatgttagaatacacagcaactatatttcttaggttagtgtagtttgcaaacaaaaggcatatatgttttcctagtaaccgcaatgtgtgtgtgtgtgtgtgtgtgtgtgtgtgtgttttaatttccctacaaatcactgctaacagccaaggaaagcgaggctatattctggaaggcctgggagatatagtcccctgtatgtgtatgaaatctgtttggaatctcatgtactatatttaaaattcatttgttactttctattatgtaatatattctcatttgtttcaacatacaaaaaatactttaaatcgattatttaaatgtatgtcatgttcatcccagagcttaatgtcacccttcatacattcatacactactacttggcttattcttcttgaggagagagaaatgtattgccagtattctcaataggtacactttcaaggctgagacagcagggctcatgaagaactggaacaatataaaccattgccgagactgcaacagcaaccatgatgatctcaaggaggcgacagatctaatggtaatgggaaaacacacccttgaggaatcagtgagcccctgcagctccctgtcatctctgtgcctcccacattccattaagagaatatagaaggaatgcatttttcatctgaattaaggtgttttgctttctgtttattgtttctttattttccaaaaatatgtttttcaataaaatctggcagtgattaaaaagaaaaaaagcaacataagattgtatttttatttggtggaaagcagcaattcattttaggtaacatgccaccacataacaggaatagagaaggtaagaaaggtaaatatacatacagaagtaagtcatgggcaaacctaaacaactaagaaaaaattagcaatgaaattaaaaggagaaaaatgcccagggaggcagaaatagattttcctgctctcctacgtctaaagagcacaatgagatacaaaacacaaatgccagtagatggcagaagctatttacctaaatcaggattgaggctatgaggcatagcttagacactcagtccagatcctaggcatttgaaactccaagttgcagaatcaattttgatcttaaaaaccaaacttcttcaaaattcccttctgtaaaagtgaggtttgctactattcaaagttttatttgcttcttaaagaatagccagaatgttcctaccactgtgttgataagcaaaggtaacattgcctctatcaggggctttttctcttttatttaagtctctgccttttatgtcaagggattcttttaatgtctaatgatcctgggatgctcattcatacttagtaggatacaaatctgagattcaagcaaagaaaaatggctccagttcctgtttttaaatacttcttcacttcactctcaactaagcctgatagcccagaatttcatgttatttattcaatatcttcagaaaaatagtcttttttccacaaaagtggttggaaaggagtggacacctgactattccaggtcaaatgggaaatctgagagtataactgcaatttattcaattttactttgcattttctctataaagtctcctacccctaccctctctctgattttctgaggtaccaggtatcctactcactaagacttctggtgcacctgaatttttgttggcatttgcttctgtgggaccttagaatttgcctttcttcagttcatttaagtcagttaccacttgttcattcacctgcattttccaaaacatctcacatgctgttatcctttgcctgttctatgtgtcctttggggttcataacttttaaaaacatttttactctcatttcaccaggtactcagaaaggaatagagaagtatgtttccaattcaccatacttaattatcagtctagccttcactgatatttcagagcaattataaggtgcccaggggcagagtttccatctgtcttgttcatgtctccatatttctctaatatatagtgaatactcattaagtgtgttcatcaagtgaaacggagaaatagaagaaactgaaaaagtggcatgaaaggacaaaaatttagcatttcaccatatgggggcagtgtctctattcatagctaaccttcaaggttagctcaaaaccctgggaaaacatctggtaagagatccgattggctgatatctggaacagagatttaaatttcgtggtagtgtttttagtgtcactctaagcccaagagagtttcttgaagcaaaaaaaaaaaaaaaaaaacccattcaggaaataattctttgctgataaggatgctccttgaacatttattaataatcttgtggatgcagctgacatgtgagtcttgagagtttctgactcttccatagcgaattctaaagggaaggaaattctgtgagggcaggaggtgaggctttatcagagactatgaaaagaggaaaacagaaggaaaaaagctagagaaggagggaggaaaggaaagacacagatgcaaggctgggaagtttggtgatatagtgtccaacacagctctgaaaaaggtgatctaaagataaccttaaccaccttcttttctctttctaaacaggggtcagtggtcaacagctgaatcagagtcctcaatctatgtttatccaggaaggagaagatgtctccatgaactgcacttcttcaagcatatttaacacctggctatggtacaagcaggaacctggggaaggtcctgtcctcttgatagccttatataaggctggtgaattgacctcaaatggaagactgactgctcagtttggtataaccagaaaggacagcttcctgaatatctcagcatccatacctagtgatgtaggcatctacttctgtgctgggcagcacagtgctccccaaacacctgcagcctgtactcaaacttgcagctggaactctagtctctatgctgccttcagctcttagtcctcttggcatgaaatgtgattatgcatgccacctttgccactgccattctgtcaccacaaactctcctttatccaaggatttgtcctccaaagattgtgctctttgcttgatgaacttgcccctctcaattcatttttagtcgtatgtaatagattttcttagttatttctgccacgatatgaggagaattgatcaacacacagttacagtagaagattttaataagtatctcttttaaaatggatgatatcaataaagtaaaaatgagagtccagaaataaatccataaatctatagccaatttattccaacaagatcattcaatgggaaaagaatagtcttttcgacaagtggtgctgggaccactggatagccacagttggatctctacttcacatatgtacaaaagttaactcaaatggattaaagacctaaatgtaagatctagaagtacaaacacttagatgaaaacatagttgtaaatcttggccaccttggactatgcaacaatctcttatatacaacatcaaaaaaagcaactgaagggaaaatagataaattgggcattatcagaatttaaatctttgtgcatcaaaattcgcaaaatattccacaaaggaaaatgaaaagataacccacataatagaagaatatatttgcaagtcatgtttatctgataaggatctaatatcaagaatatatattttaaactcttacaatttaacactaagacaaatgccaattttaaaacggtcaaatgatttaaaccatcattgctccaaagaagacacacaaatggccaaaaagcatgaaaaaaaagatgctcaacattattattcattgggaaaatgcaaattaaaccacaatgagctgccacatcacacccactaggatgttcataatttttcaaaaaggaagaataagaaagagaaatgtaaaattctaagtgttggtaaggacgtggggaaattggaatcctcatccaccactggtaggaatgtaaaatagtacagacacattagaaaatagtttggcaatttctcaaatgactaaacacagagttaccatttgacccagcaataatagtcctaaatatctacttaagaggtcgaacatgtgatttatttcattggccagaaccacatcatatggccagtactaattgcaagggaggtagagaaagggagcatttaatttgtctagcctctaaaaaagacatgagcatgaaagatgtcaattgcagataaaagtgttggtttaactatccaaaaacatctgccacatcatactaggtcctcattccccagaagagactctgatgatacatcttgatattcttattactgttattaccctaacagcatgtgccaaaggaagctgaagtctgttaagagctctacagagctcttcaaatgtagtattgtttttgctccaaaaaatatactgtaggttttcttccttgcaactgtcctgtgggaaatcaatatctctcaagaggcatcagctgatgtttcagaggaatgatggtccactgcccctgatactgatatgcgcagttccaggcagttcttaaagctagtcgctttaacgcctcacagagatcatcatgttcttaaacatcgatacggaattcacttccgtctccctgagaagcagtcccttgaagacccagcacaatatttccgtgggtcccacatgtgcatatgacataaccctcaaaatcctagggatgttttaattgaggtaatacttttacagctatttataggatctctagcacaattcttttctcaggaacttaaaaaatgggtattagctaaccatgagtaaccatgtttccttctcccttccccattcccattcagctgtatgtaggcaaatctaccatcccaactttctcgatgttgaagctatgatttattttatagcaggctttctattttattttatttttaaacttttattttaggttcaggagtacatatgcaagtttgttatgtaggtaacctgcatgccacgggggtttggtgtacggattatttcatcacccaggtaataagcatattacctgacatgtttttcaatactcaccttcctcccacccttcatcctcaagaaagcctgggtgtctgttgttcccttcttcgtgtccatgtgtactcaatgtttagctcccacatagaagtgagaacatgtgatatttggttttctttcccgtgttaatttgtttagaataatggccttcagctccatccatgttgctgcaaaggatgtgatctcattctttcttatggctgtgtagcattccatggtgtatatgtatcacattttctttatccagtctaccattgttgggcatttaggttgactccatgtcttcgttagtgtgaatagtgctgtgatgaacataggtgtgcatatgtctttatggtagaaaaatttatattcctttaggtatatacccaacaatgagattgctgggtcaaataataattctatagaaggctttttaaagtgtgggctagtattgaaggtaaagattgccttattcagttctgtatgctcctctgttcctggcacaaagaagacagtcaattaaaaatgtttacatgagaggccgggcacagtggctcatgcctgtaatcccagcactttgggaggccgaggcgggcagatcacaaggtcaggagttcaagaccatcctggccaacatggtgaaaccccgtctctactaaaaatataaaaaaaaaattagctgggagtgatgatgcgcacctatagtcccagctacttgggagactgaggcaggagaatcacttgaatccaggaggcagaggttgcagtgagccgagatcacaccactgcactccagcctggtgacagagcaagactctgtctcaaaaaaaaaaaaagttacatcattaaggggcaagatgctaattaattctcatatctgtgcctctgtgccacccagaaatgcagaaggaagcttataaacaaaaaacagtgggttaaattatctgaccttcatggggacagtacaaactatattcataagcagtaatagaacatggcattatttactttattgtggtgttgtcacatcatcagtctcttacttcatgtttctgggttttgtttcttgcttaagatctagagaattaggccactttatcattgtcacaaaaaaagtagtcttggaaaccaagcgatccatcacttcctctcaactgggcaattcagcttttctggaatgcaaatatgtttgtcttcaccttgagatttgaactttctaattagtaattctttttcttagtgatcataaagatcaagcaagaaagtactagtcttcctagacttgaacactacctacatacattatatgtattttactaaaaatagacattcctagacgatgacaagaaaactatgtaataacatttatggaatggaatgcaaccaaagctatactccaagtatactagcgaaggccaaactattctaacaaatatatgccaaacgttcagaggcttaatgaacaaagtttgtctttcttgtgaaaatctggagcagatattccaggtcagcagatgactctgccttacatgatctttgaggaactgaggttattctcatttggggactctgctatttctcagagacttaccatcatatgcagggtcatggcctggctatgccaggtttcacttagcaaggagatgaacgagtgggtatggagcaggcatgaccattcccttaagaatcatggacaagaaataatagaattactgactcctaagattatggacagctttgggtagcctgtccttcaatggtaagacaattttagaagtatctaccatctttcataaaacgtgtggacactagttttcagctattctgcaccagctcacaagatggcggtgttctattttgaatgacttccatgggtgattgagtgggagggatttgaatttaaatagaaccaaatgacactttttttaatggttggctgaattgccaaattgctatttccctttttctgagtgtgtgtctgtgtccgtgtgtgtgcatgtgtgtgtgcacgcacgcgcacacaggcagacgctaggggtagagtgtgatggttcaaaaagaaaaggaaacgcttaaaggtagtgaatcacgttttgcccaggaaaacacacttgataactgaaggatgatgaagtgtccacaggctttactagctatcttttggcttctactgagctgtaagtagggttactacaaagggtcaggggcaaccaggaaacctgaggattgatcctcagaacactaaaagggtaaagtagacttcgttctgacttattgtctgggagccctgtggttccaacggtgaataattatcacatttttctacacaggggtgagcagtgaagacaaggtggtacaaagccctctatctctggttgtccacgagggagacaccgtaactctcaattgcagttatgaagtgactaactttcgaagcctactatggtacaagcaggaaaagaaagctcccacatttctatttatgctaacttcaagtggaattgaaaagaagtcaggaagactaagtagcatattagataagaaagaactttccagcatcctgaacatcacagccacccagaccggagactcggccatctacctctgtgctgtggaggcacagtgctccctagtcacctgcagcctgtactcaaattctacagctgaggctctgcaactgtaagatggggaacttgctacattgagcaagccctcaaaaataaactatacggaaaagcagttattggtcaaaatccttgtgcctatgttgacaattacttttgcagtttactgaatcctaactcagagtcatatcgctgcattcactactttctctgtgagttttctatgggattcagcatagctaatatttctagagggtcactcaggatactaactccattgccacaccattatgctctgtggtagaaagcaagcccttttatcaggattgtacaggcaactgatatgtgcactacacattagggaatctacctaacagctatggatgttttagcttctttcccaggacaggcacatttataggtaaagttctgcctataacatttttttctggacctactagcaaagaacaaagggtaggaacaagcaggtatcattacctgattaaaacaaaaggttttcattctcagttgcattattcttacttactatcttcattttaggattgttgcctatgctaggtacttcattaaagtggtgatagaatttttcaagatattacacattaatttgtgtacttagaaccttaagcagcctacgaaaagaaaggagttagttgaagtaagttatgtgaagctaacataaacttagcctacttatgttgtgatacactctttcaatgaattatgtaatcatatgtatggtatttacaaagagcttgcaatggaagctaccatttattgaaagcaagtattatgtaccttgtattttgcaaatatcatctcattgaattctcaaaatcactttgataaatcatcaatattactttctgttaacatattaggaaatgcagactcagaaagattaagcccccttccccacctcctaccccagacaaataactataacagaatctgaaatcaggtctatgactccaaactatactttgtctattacatgccctgatgttaaacatcactgaggagaaaatttacccacagtgtgaccacaattatgtgtaaaaaatgtacacaaaatacgaaaataatgtgttcaacatgtaaataaaataacatttgcaataatatgtgaataaaataactccaaaagtttgcaacagtattagttatctttgaatactgaacttaatactgttcattgttttactcctttataatattctttatttttcaaattatctactatgaactcaatactattattatttcagaaagaaaaatatacattttaaaataccaaaatccaagtaggctgaactgcattatatgataattatctgacactcacagtagcttaattacaatgaggaatagacatgactatacatagccaaatgatacagcattaaaacaagatttttgattgctagctcttcaaatcactgtagactagtgctctcttcaattgggaatgttttaaaattacaagaagacctatttctcctgagaatttatttgaatgactgtcctatgggtagaatgctttaatatcccatctctgtgtaggagaggacaggcagtaaaggccacccgtgcttgtgagttcattagacaattcattgcaaattgggcatggtttaggtttcactgtctgggaaatggggagatagcctgagaaaagggcaggtaaacattcaaagaggaggggaagaaacagtataaaaattaatagaatgtatcctgccatttttagcctgcacagtcttctgtccattttcctttctcctttctatctacatcaaaacccagaaatcacacagtggatataagaggaaactctgacagtcatttatttaagactgaaaaatagagcgggaaaccctatgcaagatgcccagtgtgtctggctctgcggtgtgaagagtttatgatttagaagccagagatttagctgtctttgatgggaatgtgcagttggaagggggaagtttcttttttcactctttattgtttcctatcctaatgagaaccaaacaatttacatctcaaaagatcaacctgtcaccaaaataacatgtcttttaatgctaagactaaatatccatttgttataaaagaaaaaacaaattaaaaaaatttataacctcaacctacagacattaccactattaactatttagcattttgctttccatttcacctgtatcaatgaacatgaaaaaataagtctgtagagatgtggggaattcaacttatttcaaacaaagagtgtttctcaaagtcactgcaaaaataggtgtttctgttccttaaaaaaatctacatggttaagatcctcccacttttgacctgtgagttgtgataaaaagcttccagaaaactcatctcagtgacttgattatgaaatgctaccagtttgaagcagtcactgaaaaacataaggtcataaatcaggaatccagaagaaacaatgaatagcaactttatcttcacttcacttctaacactggctctccaaggtaacagccctatcctgtacccagagtggcccttctggagaaggtggctggtttgacctatgactgttgagtgttttacattacagggtctgggagagcagactggatcaagccccaggagacagaagtatctggaacagaagggaagactgtgaacctactttgtaactatggtacatcatcggggagctatcttgatctctgctggttttgacagtatccgagccaggcatcagaatacattctctacagagggtggggatattctggaaaaggagatgccagttttgccataggaaagtttattcaaagagtacagcaaatgcaataaatgtgtacattagaaatctggttcctgcagacactgccttatattactgagatgcacaaaaagaacactttctaggggtgtcatacaaaaacaccagcgcacaggaggaaggagagcatttgttataaccacactgatttttttttttttttttgcaaaggcgtcattgtaagtggaagacactggatcaggagaattctgctttaataatagctatatatagtaatttgtaggcaaatagcttgagcttttagagtttccatttcctgaaattagatagcaattctaatttgtaagcttttatgagacatggttttaacacttggattaagtgcctagcatgtcctacatgctcagcaaatggcaaatatcttttcttgctctccctctctgtctaactactttgacctcaaaggacccttctttcactatctgagaatcttctatatactcctactggtaaaataacaacaacaataacaataataataataataaccctaaaaacatacatgcaagacctagatagagaaggcttctttgcccagggatcaatggtcattgtgccaggattttaaaagtgtatgctcagcaaatccaacaatcagaggacaaaaggaccccgagacactagctcctgagttcatagaccagggcagttgggcatttatcgtgatctgaacaagaacaggagagagttcctcacaagactaaagagaagagaaagacatttagcattaggtgggtggtgggagagaagagagaaattcttgggaagactacagccatgttctggtgtcagatctgacctccctagatggagaagagaggccaagtgaggcagtgggtcctcagcccacctggtagaggaagagggcacctgccacttcctgcactggttcaaactacactcctaacagaatcctatcatttaatctggatgtgagcaaagcctagcatctttgtttggactggtgatagatgaaaggtaaaagaggaaggaagatttaatttagagccttattcaatagtctgcagcagcactagcaccttactgcttgcaggccggaaacctcaaggtctagcagttcacagtgaagcctgcaccacactggctgctgagtaactgccccagtcactaggagggcttggaaatcagacagcaaatgacaccttaaaaaatatgtataaggccattcttgcactgttataaagaaatacctgagactgtgtaatttataaagaaaagaggtttaattggctcatggttctgcaggttttacaggaagcatggtgctggcatctggttggcttctcagaaggccccaggaagcttataatcatggtggaaggcaaagggggagcaggcatgtcacatggccagagcaggagcaaatgagagagagtgagggggaagatgcaacacactttatttaaaccagatcttgtgagaactcactcactaaagcaaagacagcaccaagccataagggatcccacctccatgatacaaacacctccccccaggccccacctctagcactgaggaatacaattcaacatgatttggatggggacaaatatccaaactatatcattccactcttgatccctcctaagtctcatctccttctcacattgcaaaacacaatcataccttcccaatagtcctccaaagttttaacaaattccagaattaactcaaaagtcccaagtctcatctgagacaagtcaagcttttccaccaatgagtctgtaaagtcaaaaacaagttatttactcccaagatataatgtgagtatacacattgggtgaacattcccatttcgaaagggagaaattggccaaaagaaggggccacaggtctcatacaagttcaaaacccagcaaggcagccattaaatcttaaagctccaagataatctccttagactccatgtctcacatccaggacacactggttcaagaggtgggctcccaaggcgttgggcaactccacctctgtggctttgcagggtgccacccccacagcttctctcataggttgttgagtgtctggcttttccagacacagggtgcaagctgccagtggatgtactattctgggatctggaagatggtgacccctttcccacagctctactaggcagtgcttcagtgaggattctgtgtggggcctccaactcctatttcccctccacactgccctagtagaggttatttgtgggggctctccccatgcagcagtcttctgccttggcacccaggctttctcatacatcctttgaatctaggtggaggctgccaagcctctttcactcttacattgtgtgtgcctgcaggcttaacaccacatggaagctgcccagagttatggcttgcaccctccaaagtggcagcctgagatgtacctcggcccctttgggtcatagccagagtggccaggatgtggggagcagtgtcttgaggctgtgcagggcagcagagtcctggacctggcccctgaaaccattctctcctcctaggcctcaaggcctgtgatgggaggggctgctgcaaacatctctgaaatgcctttgaagccttttccccattgtcttggctatctggctgtcttttagttatgcaaatatctctggcaagcagttgctttgaggcttgcttgaattcctttcctgaaaaatctttttctttctctcccacatggctaggctacaaattttccaaacttttacactctgctttttaaaatacaagttctagctttaagccatttctttgctactgcatctgagcataggttattagaagcagccaggtcacctcttgaatgcttcactgcttagaaattgcttccaccagatatactaaattatcactctgaagttcaaacttccacaaatccctagggcaggggcacaatgcagccaagtttgttgctaaggaatagcatgggtgacattcactccaattgccaataagttcctcatttccatctgaaatttcatcagcctggccttcattgcccatatcactatcagcattttggtcacaatcatttaaccagtctctaagaggttccaaattttcgctcatcttcctgtcttctgagccctccaaatttctcagacctctgcctgttacctggttccaaagctgcttccacattttcaggtatctttatagtaatgccccacttctcagtaccaatttgctttattaggcctttcatgcaccactataaagaaatacctgaaacttggtaatttattaaaaaaaaaggtttaattggcttatggctcttcaggctttacaggaagcatggtgctggcatctggggaggcctaaggaagctttcaatcatgacagaaggcaaaaggggagcaggcatgtcacatggccagaacagacacaagacagagagagtgagggggaggagccacacacttttaaatgactagatcttgtgagaactcactcactattgcaaagacagcaccaagtcatgagggatctgccctcatgatccacatatttccccccaggccccacctccaccattggggattataattcaacataagatgtgggttgggacaaatatgcaaataatatcacaataatttcttttataaaaaagtgaaaaatacttttattagagaataattttcaaagatctgtttaaaactaacttttaaaaacaatgaactatgggaaacattcactaatgcataaaataaaatatgtaatctttttcattttcagtttgtgcaaagttattttcacaccctgctggtagcaacacaatatattggtacaatcttttacacagtgaattacttggaaagggattttgagattcattaaacagttcatgcctttgaactgtttgaaactgaatgaacacctttgatccatttctcagaatttatattaaagattgattttaagtagaaaaaaccctctaggcaagaaaatagtaaaaatttctcaaccagttagaggaatttggatggcaacttgactgaatactttacaactatttaatgagttaataatactaaaaacatagtaatgctcttgacatacagttagagaaaacatagagttcctataataaccatatgctcacactaatatcgaatgaatgaagcacatagataaaaactggaagttttgatgcaaaactgaaagtatgaaattatttagtgtatgtacttgcaatattttaatttttattttttcatggaataactgtgaacttgtgcctacaataaataacattttaaaaattctcttgactccaaatgttgtagctagtggaaaaacaaacaaacaaggatctcaaccccagctctgtgcctcagctgtttctcctttcttcaactctggggcatcaattttctggttcccttcccttaactaagtcctcttcttcattattccccaagacctgctgacagaaactctgctgaaatattatttgtgtctcaaacctatctttgatatgggcaaataaggaaaaaactattttcagttcttttctattttctctgcagtagactcagtagctagaagattgagctgattgtaccaaaaattaagaattcttcattgacatcacatgggaaaaccatctccggttttccaagaaggaagattaggtaaggctatataccttgtcattttttttaagttggaacattaaagataaagcttaagtcctctctgctcatgttttcatctgttctcttttcccagagctaaatgttgctctgggtttgtgaaaggaaattaaatcttgggaccccaaactcattgagccaaagggaaaagttaagctgcgaactgggccatgcaaacctgccttgccctttcagttcctacataagatggctacaagatgaaaagctacatgactccaccatattttgcccacaaggaaattcctagtgagctgcaagatctttaccctatagtgtctctgttaaaatttcaccttggaaggccgggtgcggtggctcatgcctgtaatcccagcactttgggaggccgaggtgggtggatcacgaggtcaggagactgagaccatcctggctaatgtggtgaaaccccatctctactggaaatacaaaaaattagccaggcatgtggtgggcgcctgtagtcccagctactcgggggctgaggcaggagaatggtgtgaacctgggaggcggagcttgcagtgagccaagatcgtgccactgcactccagcctgggcaacagagtgagactctatctcaaaaaaaacaaaaaacaaaaaaaaatttcgccttggcaatgtaaactgatagcttattatctttacaggtgcagtcaacccctgtccaccagacataaatacacatctgattgttcccctgccccattttgcctatgttatcttgtgtaaaaatgcaaattccctgcattttttctctgccccatttatctatgtcatcttatacaaaaaaaaaaaagcagattcactaagccagacaaaggcatgaataactatttttccctacccttctcttacctaaaaattgtatacttctcaatatcccaccctttcccctttaaatctggagccctcaaaatcatcttcggagaaagtcatagacctgtctcctgggcacacatccttaactttggcaaacaaacctaaaatgattgagacttgtctcaccatttttctcaattgacacgtttataatttacattttaaattctttatctttattaatatgcacatataaatgtacatactcatgggaaatataaactatgattttatggcatttttaactaaatgttacatatgatatgtttttctccacaatttcctttcattttactcaacaaaatagacttgaagactagccaggttgatagagatcatctcatttccttttaattcatgtaaagtaaatcattctatcaatatgctatatttaataatactgatagtaataatattatttctccacaaagtagacaactaaggttcagaaagattaatttgccaaggtcacataattagtaagtggcagaatgaaagacaaatcaaatcttctgactttagaaagttcttctgtctttctcatttccaacatgtttagtggcaagagaaaggttttcttcacagaaacctaatatcccaagcaaatttgtatgtaggatttctcttgaaaattacctctcacttggctctgttcttatggctattaggcaataaatactaataataaaaataaaaataacaaaaacccctctctcccatattttggaaatttttcaatgcaacacaatggtcaatgttgttcattttttccctcatttctttgtctccaaccaaagaagcatatctctattttaattactcaacagtggggaatcaaactgattgggatataaacctaggcatttgagctggcaatggctaccctctttgggtcccctccctttgtatgggtgctctgttttcactctatttcactctattaaatcttgcaactgcactcttctggtccatgcttgttatggctcgagctgagctttcgctcaccatccaccactgctgtttgccaccatcgcagacctgctgctgacttccatccctccagatctggcagggtgtctgctgtgctcctgatccagcaaggcgcccattgccactcccaattgggctaaaggcttgccattgttcctgcacagctaagtgtctggcttcatcctaatcgagctgaagagtagtcactgggttccacagttctcttccatgacccatggcttctaatagagctataacactcaccgcatggcccaagattccattccttggaatctgtgagaccaagaaccccaggtcagagaacacgaggcttgccaccatcttggaagtggcctgccgccactttggaagtggcccaccaccatcttgggagctctagaagcaaggacccccggtaacattttggtgaccatgaagggacctccaaagtagtggtaatattggaccactttcactcactattctgtcctatccttccttagaattggaggaaaatactgggcacctgtctgccagttaaaaatggttagcgtggccaccggacttaagattcaggtgtgaggctatctggggaagagctttctaacaacccccaacccttctgggttggggacgttggtctgcctggagccagctcccactttcaactttcttggggaagtggagggctgactagaggcagaaagctctcatccagaactcccagcagtagccggttgagaccatggcgcagccagaagtctctagtcaacagtcgcccatacctcctgggtcccgaccacaactttcttgaaagtgtagccccaaaattctccttacctctgaatctacttcctctgatccctgcctcctaggtactaatggttcagactttcatttcctctagcaagttgtatctccaaagggatctaaggaagctctacactgtgtccttaggcacttaggctataacccagggagtcttatccctggtgtccctcccaatttaggtatacggctctcaacatgggctgttatgtgggacacattccccaccacccttgtcagggccccaagtttgtaatggctaagagagagagacagagagaagacagagagagagagagatggagagagagagagacaaagatggagagagagacaaagagggagtcaaagagaaaaagatagaaatagaaaaagaaaagtgtgccctgttcctttaaaagccagggtaaatttaaaacctgtaattgataattgaaggtcttgtccatgaccctataacactccaatacttttttatttacactttgttgtcagtgtaaataagggcttagcccgaaagcactgaggccactgacaacctgtagctttcctatcaaaaatccttaacccagtaacccacggatgggccaaatgcattcagtcagtaccggcaactgctttgctaaaagcagaaaagtaacttttagaggaaacctcattgtgagcacacctcaccagttcagaattattctaagtcaaaaaagcaaaaaggtagcttactaactcaaaaatcttaaagtatggggctattctgttagaaaagggtaatgtaactccaacctctgataattcccttaacctagcagatttcctaacaggggatttaaatcttaattaccatacaaaggtccgaccagacctaggaagaactcccttcaggacaggatgatagatggttcctcccaagtgactgaggaaaaaaccacaatgggtattcagtaattgataaggagactcttgcggaagcagagttagaaaaattgcccaatagttggtctcctcaaatgtgcgagctgtttgcactcagccaagccttaaagtaattacagaatcaaaagactatctcaatcctgactcaaaaggttacctacaccctctctgaaatgaatttgcataagaactgttgtttatgggaatgcatcttgatggggcagctgggttgttatgaaatactcaggaaactagcccagatctaggactcacccctgagagcaaaggcaatgttgggcatgctggtaaaggaccgctagaatccagcagccaggaccactttctttgtggtcaagaaaggtgggaaaacaggtgcaggactgctacactggtaagcataactaatccgataagcagaggtccatgggtggttacgcaccctggaaaggaataagcattaggactatagaggacactctaggactaatgctcatcggaaaatgactaggggtactggcatccctatgttcttttttcagatgggaaatgttccccccaaggcagaaatgcccctaagatgtattctggagaaatgggaccaatctgaccatcagacactaagaaagaaatgacttatattcttctgcagtaccacctggccacaatatcttcttcaaggggcagaaacctggcctcctgagggaagtataaattataacaccatcttacagctagacctcttttgtagaaaagaaggcaaatggagtgaagtgccatatgtacaaactttcttttcattaagagataactcccaattatgtaaaaagtgtgatttatgccctacaggaagccctcagagtctacctcccgaccccagcaagaccccaactccttctccaactaataaggaccccccttcaacccaaatggtccaaaaggagatagacaaaggggtaaacaatgaaccaaagagtgccaatattacacgattatactcgctccaagcagtgggaggagaatttggcccagccagcgtgcatgtacctttttctctctcagatttaaagcaaattaaaatagacctaggtaaattctcagataaccctgatggctatattgatgttttacaagggttaggacaatcctttgatctgacatggagagatataatgttactgctaaatcagacactaaccccaaatgaaaaaagtgctgccataacagcagcctgagagtttggcgaactctggtatctcagtcaggtcaatgataggatgacaacagatgaaagagaatgattccccacaggccagcaggcagttcccagtgtagaccctcattaggacacagaatcagaacttggagattggtgccacagacatttgctaacttgcgtgctagaaggactaaggaaaactaggaagaagcccatgaattattcaatgatgtcccctataacacagggaaaggaagaaaatcctactgcctttctggagagactaagggaaggattgaggaagcatacctccctgtcacctgactctattaaaggccaactaatcttaaaggataagtttatcactcagtcagctgcagagattaagaaaaaacttcaaaagtatgccttaggcccagagcaaaacttagaaaccctactgaacttggcaacctcagttttttataatagagatcaggaagagcaggggaatgggacaaatgggataaaaaaaaaaaaaaaaggtgactgctttagtcgtggccctcaggcaaatggactttggaggctccagaaaagggaaaagctgagcaaattgaatgcctaacagggcttgcttctagtgtggtctacaaggacactttaaaaaagattgtccaagtagaaacaagctgcccccttgtccatgccccttatgtcaagggaatcactggaaggcccactgccccaggagatgaaggtcctctgagtcagaagccactaaccagataatccagcagcaggactgaggatgcccagggcaagcgccagcccatgccatcaccctcacagagccttgggtatgcttgaccattgagggccaggaggttcactgtctcttggacactggtatggccttctcagtcttactctcctgtcctggacaactgtccttcagatctgtcactatccgaggggtcctaggacagccagtcactagatacttctcccagccactgagttgtgactggggaactttactcttttcacatgcttttctaattatgcgtgaaagccccactcccttgttagggagagacattctagcaaaagcatgggccattatacacctgaacatagcagaaggaacacccatttgttgtcccctgcttgagaaaggaattaatcctgaagtctaagcaacagaaggacaatatagacgagcaaagaatgcccatcctgttcaagttaaactaaaggattccgcctcctttccctaccaaaggcagtacccccttagacccaaggcccaacaaggactccaaaaaactgttaaggacctaaaagcccaaggcctagtaaaaccatgcagtagcccctgcaatactccaactgtaggagtacagaaacccaacggacagtggaggttagtgcaaaatctcaggattatcaatgagactgttgttcctctatacccagctgaacctaacccttatactctgctttcccaaataccagaggaagcagagtggtatatagtcctggaccttaaggatgccttcttctgcatccctgtacatcctgattcccaattcctgtttgcctttgaagatccttcaaactcaacgtctcaactcacctggactgttttacgccaagggttcagggatagcccccatctatttggccaggcattagcccaagatttgagccaattctcatacctggacactcttgtcctttggtatgtggatgatttacttttagccacctgttcagaaaccttgtgccatcaagccacccaagtgctcttaaatttcctcaccacctgtggctacaaggtttccaaaccaaaggctcagctctgctcacagcaggttaaatacttagggctaaaattatccaaaggcttgagggccctcagtgaggaacacatccagcctatactggcttatcctcttcccaaaaccctaaagcaactaagagggttccttggcataacaggtttctaccgaatgtggattcccaggtacagcaaaataggcagatcattatatacactaattaaagaaactcagaaagccaatacccatttagtaagatggacacctgaagcagaagcagctttccaggccctaaagagggccctaacccaagccccagtgttaagcttgccaaggggcaagacttttctttatatgtcacagaaaaaacaggaatagctctaggagccatcacacaagtctgagggactagcttgcaacccgtggcatacctgagtaaagaaattgatgtagtagcaaaggattggcttcattgtttacaggtagtggtggcagtagcagtcttagtgtctgaagtggttaaaatgatacagggaagagatcttactgtgtggacatctcatgatgtgaatgccatactcactgctaaaggagacttgtggctgtcagacaaccgtttacttaaatatcaggctctattacttgaagggccagtgctgcaactgcgcacttgtgtaactcttaacccagtcacatttcttccagacaatgaagaaaagatagaacataactgccaacaagtaattgctcaaacctatgccgctcgaggggactttttagaggttcccttgactgatccccacctcaacttgtatactgatggaagttcctttgtagaaaaaggacttcaaaaagtggggtatgcagtggtcagtgataatggaatacttgaaagtaatcccctcactccaggaactagtgctcagctggcagaactaatagccctcactcgggtactagaatcaggagaaggaaaaagggtaaatatatatacagactctaagtgtgcttacctagtcctccatgcccatgcagcaatatggagagaaagggaattcctaacttccgagggaacacctatcaaacatcaggaagccattaggaaattattattggctgtacagaaacctaaagaggtggcagttttacactgccggggtcatcagaaaggaaaggaaagggaaatacaagggagccaccaagttgatattgaagtcaaaagagccacaaggctggaccctccattagaaatgcttataggaggacccctagtatggggtaatcccctccgggaagccaagccccagtactcagcaggagaaatagaatagggaacttcatgaggacatacttccctcccctccagatggctagccaccaataaaggaaaaatacttttgcctgcagctaaccaatagaaattacttaaaacccttcatcaaaccttccacttaggcattgatagcacccatgagatggccaaattattatttactggaccaggccttttcaaaactatcaagcagatagtcagggcctgtaaagtctgccaaagaaataatcccctgcactgcaggccatacatttcaatccctgtatctttaacctccttcttaaatttgtctcttccagaatcaaagctgtaaaattacaaatagttcttcaaatggagccacagatgcagtccatgactaagatccaccacagacccctggaccagcctgctagcccatgctccaatgttaatgacatcgaaggcaccccctcctgaggaaatctcaactgcacaacccctactacgccccaattcagcagaaagcagttagagtggtcatcagccaacctccccaacagcacttgggttttcctgttgagaggcgggactgagagacaggactagctggatttcctagactgactaacaatccctaagcctagctgggaaggtgaccgcttccacctttaaacacgggacttgcaacttagctcacacctgaccaatcaggtaggaaagagagctcactaaaatgctaattaggctaaaacaggaggtaaagaaacagccaatcatctatcacctgagaacacaatgggagggacaatgatcaggatataaacccaggtattcgagctggcaacggctaccctctttgggtcccctccctttgtatgggagctctgtttttactctatttcactctattaaatcttgcaactgcactcttctggtccatgtttgttacggctggagctgagctttcgctcaccatccaccactgctgtttgctgccgtcgcagacctgccgctgacttccatccctccagatccggcagggtgtctgctgtgctcctgatccagtgaggcacccgttgctactcccgatcgggctaaaggcttgccattgttcctgcatggctaagtgcctgggttcatcctaatcgagctgaacagtagtcactgggttccacagttctcttccatgacccatggcttctaatagagctataacactcaccacatggcccaagattccattccttggaatccgtgaggccaagaaccccaggtcagagaacacgaggcttaccaccatcttggaagtggcccaccgccattttggaagtggcttgccaccatcttaggagctctgggagcaaggaacccctggtaacaaaacctgatgtttgttctctactaaggaataaaacaggcatacatgtgagataactataaagagtcaggacatgatagaggtctgcacactatatcagaagccctgtttccagctctgtggctgcagcatcgcacaactccagtgctctgcctgaggctggctgtgcatgcagagctgagccctaggttttggcaggacaagacatgttttattcagggagatgagaaggcctgtcaacatgtactgccccacctgctgcggccaactgtggcctccatcttccccagtaggcagggatggactgagggaggaaagacacctgcggcacatctgaaagatgctttgggccggggacaaaaaagaagtgatagaaaccaggctgtgctttttattgctgtcaggacaattttcttaggacatgggggtttcttttttttttcttttttttttttttgagacggagtctcacactgtcgcccaggctgcagtgcagtggcgtgatctcagctaactgcaagctccacctcctgggttcacgccattctcctggcttagcctcccgagtagctgggactacaggcgcccaccaccatgcccggctaattttttgtattttttagtagagatggggtttcactgtgttagccaggatggtctcgatctcctgacctcatgatccgccaacctcggcctcccaaagtgctgggattacaggcatgagccaccgcgcccggacaggacatgggggtttctaaacaaggctcttcagtatcagctcattgtgagtcacagatcagatctgcccagttctcttttgctgttgacattgttgtttcctctgcaggattcagcagtactgaaagggttattcagtcccaacatgggatctttacacaagaaggggagcttgtgaaatgcaagtactttgcaaatagctcaacttattttctttcttgttttgggcagcattccagtgaggaaatatttcacctgatttctcagagtttaggagcatccaggaacgcaaggaataaaaaatgttctgtgaacctgcaaatagctgccaacactgtcattctcaccatttcagttatgagaccaaaagactcaggaaacagtttctgtgcactcaagacatctacagtaagaggaacaataaaagttgtagttaaaaaaaacaaaaaacaaaatactcagagcttgtaccccagactcatctgccacagggactgggagagatccacgggccctaaactgaaaaaatgtgagcctgtggacagcattcatgaagtatggacaggaaacaggtaactgttgcaagaaaaaccctctcaaactgcattcattgagcagtgctttcaatccacagtccttaaattgactttctccttcaaattttagcaggtaacaaaacagtactttattttaatctaattatttttcttttttctttaactttttatttgatatatttcaaaatataaaataatactgcttattgtaatagatgaagtaataaaaagttttataaagaaaaagttaattctcactcatctgctccctactgaagtaaataatattaataacctgataagtgtcctttcccactattctttctgcttatataaatataggcaaaaatccctcctagtggaacaaatctgtttggggttttttttgttttgttttggtttggttttctgagacggagtctcgctctgttgcccaggctggagcgcagtggcatgatcttggctcactgcaacctctgcctcctgggttcccaccattctcctgcctcagcctcccaagtagctgggactacaggtgcccgtcaccacgctcagctaattttttgtagttttagtagagacggggtttcaccgtgttagccaggatggtcttgatctcctgacctcgtgatccgcccgccttggcctcccaaagtgctgggattacaggcatgagccaccactcctggccacaaatctgttaataaatgtgtgaccaattggaatttttcctctgaatcgccttttacatctttgtccatttttcttttaggttatatatttctcacttaaaaatgcatgctagagatgtcaaaaattttttttatttctccagtctattgtttgtcttctgattttgtttatagcacgtagcatggtatcctttgcctctaaatatactctaaactgtatatagttaaatatgcctgtcttctttatatcttctgcatttctaccatacttaaaaatagtacaggtttatataaatattcccagattcttagacaacagttttatcattttgctttttacaataaaatctttcaaccatctggaaactgtttttatatatgaaatctattttccactattgaaatgtctttgtcatattttatgtttcttaaacataatcaaattatatacatccatattaagaactttaccagtatccaaacattacagaataatgtaagaatcacagtggaactgggtgctggtgaaaataatcactgaattctccagtgccagtttgaaaggagaaattattagccattccactggggtgagaaaggccaatgagtttgactgatgttaaccaaagagagattaaaggatggactaaaagtataaaggggtgacatcttggggaaatgcaagtcttgtgcagagagaggaagatgtttaacttatcctactcaactcctttcctatatgaccggaggtgcctagtccagcttccacccactccactaagttgaggaatagctatcatcacatgtctggaagataatcagcttctgaactggcagagcgtctctggttcttgtggcaaagacataaaatgtgggagaaagtagagaaaaagaaagtgtggtagcctgcattcccaccttttattgaggcaatttttcatgtactagtggttttaatgaatctgtataggtctgaaccaacttgaacctgaacctaccctgcctccaaacagctgtcacttaggggaaggctctagcacaggaggctgtggattgacccatgtgtgaactggaggaggaggaggaggttgagcttgagaacgatcaccactccaggaaatcacgcagatgaagggccctgtagccccctgaagaaaacactagcacaccgttgtgagaaagcacacatttggatttctgccaccaagagggaatccatggccaggaagagataagaaccaacaggaaggagaaggaacctctccatcagaaccctgagaaattcacataaggaaacagcatctgagcaaccaagaagacaaggcccctcagcccaggagaggctgaaaagagagtcctttatttctcccaccactctgcccaacagctgagggttgacatggggtgaagtctgaaagaatagcacatctacctgtcagtggagctcccagagtcttcctgctgggtgtgggtggagggtagagctttgactctaaaatactaattaagttcaaaatgaatacacacatagttggaacaaaactgctttagtaactaaaagagaaaggataacctgtttcccagtggaaaagagatgattgataagtgaaaaaaaaatgaaaacaatttcacactcacatttatctcatgacttgaaatgctctagtcagcacagtaatatctggatctctttgggtattttctattaaatgttccgcttattggcttaatccttcacttatatcatattgttttgtttagagtagtttagagtaagtttttatgtcataaaaaaactgatcttaatattccttttcaagaatgcagttgaaagttcctagatatttgttctctcttatgcatttcatcttgttcaaacaaatggcattctgactgtaactactttggaaagtttaacattttaggacattatatttttccacaaaagaaaaatccatctatttaggtcttattttaaaagtaaattttgcatgtttgtttgtttcttacataccttccactttctttttttttgagacaggatcttgctctgcagcctaggctggagtgcagtggtacaatcatggctcactgcagcacagacctcccaggctcaaatgatcctcccacttcagcctctaaagtagctgggattataggcatccaccatgcctgactaattttgttttttagagatggcgtctcactgtgttgcccaggctggtcttgaactcctggcctcaagcaattctcctgccttgaccttccaaagtgcagggattacaggtgtgagccactgcacctggccagatttctgcttttcttattaaatcaattgctaaatattgtatcatctgtgttgcattattactgaaatttttcttcatttagagaaatttattccatataaggaaaaattactaatttttaatatttgcttaatagccaacaatttttgttacttgttgatttttagcagtactatgaccaaagtggcacatgtacatgtttattttttaaattcctgaatagtacagaaaagtctgtattacaaatctggtttcttatttctctccaactttcaatccttgtccataaatatttacacttttaagtctggatcttctagcagtgagctccatatttctaaataatatgttttaactacttcttgcaacatacattttattcttttattttatttacttatttttttagatggagtctcacactgtcaccctggctggagtgcaatggcatgatctgggctcactgcaatctctgcctccggggttcaagcgattctcctgtctcagcctcccgagtagctgggattataggcatgtgccaccacatccagctaatttttgtacttttagtagagacggggtttctcctcgatggccaggtttgtctcgaactcctagccccaactgatccacccgccttggctgcccagagtgttgggattacaggcatgagccaacgtgcctggctgcaacatgaattataggtgttacctgttgactttcgttttgttttttaaatagacttaattttttaaagcaattttaggttcacggaaaaattaagcagaaagtagagagtttcccatatacttccaggcctcacatatccacaggctcccatgctatggacatcttccaccagagtgataacatttgttccactgatgaagctacattgacgtattattattacccacagtccatagattacattagggttctctagtggtgttgtacgttacatgggtctggacaaatatataatgacgtgtagccgccattacagtctcatacaggttgtttcactgccccaaaatcctctgtgctctgcccgttcactcctccctccccccagctcctgacaaccactgatcttgttactgtttccatggtgttgactattccaaaatgtcatatacttagagtcataacagtatatagcctttttagattggcgtctttcacttagcaataggcatttcagatttttccatgtgtttcatggcttgatacctcatgtcttttgagtgctaaataatattctgttgtctggatgtaccacagtttatttacctattgaaggacatcttggccacttccaagtttgggcaattatgaaggaagctgctataaattcatgcacattttgaactcatttgcttaaataagaaagagcataatttctggatcatatgcaaagaatatgtttagctttgtgagaaactgccagttttcttccaaaatggctgtaccattttgcattcccaccagcaaggaaggagaattcctgttgctccacaccctcactggcatttggtatcgtccgtgttttggatttttgccattctatctggtgtggagaggtcgctcattgttgtaatttgcaattccctagtgacatttgcatggagggtatcttttcatgtgcttatttgtcatttatgtacatttttaatacgtttcactttgggggtcatttagccttcacctggcaaaacaaacaaatgaaaatttacacataattctgtgaattaatttttaaaaacttcataaacctcacctttatccacttttattcttacttatatttacctagtcagacttttcagaactttttccaagttgtcagaacatatttaaaataataaaattaaaataggaggaatttttgcctgtcacctttgctcttctctcttttccctcatccactcccacaccttttcttctttagtttccttccccaaccattccaaacactcattatgcccaagcctctttggacacttcgatcaaaattttctcctctatatcatccggaggaaatgcaccgtttgctcagggacacttagctcacctgcttcccacgttttctctcggtctccacttgtgtctggactgagtgttgctgaccaccacagcatcaaagagcctgtgagaccactggatgcagtctgggggtcagtgacctcagaggaaataccttcagtgtcccacgggctctgcaggtcagtgcactcagagtgagcttcctcacactttgctggggaaagtgtccagtagcttcaataatctcatgaccaaaagactgaagagaggggagaagacatccgagttcacattttcaggcaatagtagctgacatttcctgaatgatccttgtgtgtcaggcaccttaggtccgttcatgacttaccacatgtttctgtatgacagcaccatggggaagcttctgtaattaattcctattggataggttgctgctgatggaagtggggtctccaaatcctctatcccagagtctgtgctgttctgcagactgaatatgctttctccccaccccttcctcaggctttggcaaaggagacctctgaaaaatggcacttagtatattattgacttttgttttttaattggcttttggactaatgaggtcagtataatgtgtgaaaccaaactagaaggcagtgctggtaagtttgttgagtctctgacaaatatttggattctgagcaattcaaacatccaggcaactttaaaaggtcttcttcctctgagactcatagtgacttatacaaataaaaataaaagattagtaataatagtagttcatcaaacactgcatttacttatattttctcaaatactattttcttttttttgaggcagagtcactctgttgcccaggctggattgcagtgatgcaatcttgactcactgcaacctctgcctcttgggttcaagcgattctcctgcctcaatctcctgagtagctgggattataggcatctgccaccaggcctggctaatttttgtatttttagtagagacagggtttcaccctgttgtccaggctggtcttgaactcctgtgatcacccacctcggcctcccaaagtgctcaagtgatcacccacctcggcctcccaaagtgctgggatttcaggtgtgagccaccatgcccagcttcgaatactattttctaccataccatttaaatgtcattcaaatttaatattttcaacaaattttgaaagaaggcaatcaggcaaatttcatctcagtcaaataatccctaaagttacacatgctgtggctgtacctttctcaactttgtttcccttcatccagttaagacttggttgtgcagagttaggggctccgcaggtgatgacatgatcaaaggccctgacccttgtcacaagagtactcactaagaataaaagtgtttgacatcctctcagcaactctgatgtgtaatcccaccagcaattagtgtttttctttctccgcgttgattacagatagtttgcttttccctgtatgactgcaaaggtgtgtatatttgaatgtatgtctgtatgttgtttgggttgcagggaaggaaggagtagaaaaaggaataagaggtggctgtgattggctggtcgctctgaatgcaaataactctatgcttttcacctttagtgaatatataaatgtctcaggataggagcgataataaataatgccaaagatcttccttagtggtcctgtggcttcattgaaggcatacattgaaatgtttctagccaggtgcagtggcttacacctgtaatcccagcactttgggaggccgaggcaggtggatcacaaggtcaggagttcaagaccagcctggccaagatggtgaaaccccaactctactaaaaatacaaaaaattagccgggcaaggtggcacgtgcctgtaattccagatactccagaggctgagacagagaattgcttaaacctggagaggcggaggttgcagtgagccgagatcgtgccactgcactccagcctgggtgacagagcgagactccgtctcaaaaaaaaaaaaagaaagaaagaaagaaagaaatgtttctgaacaggggaaaagccaaatgcaatgggcattcccgaaagactgaagaaagaatacgtgcaagttgattcttctggggtttccaggaaagttgggaaaagaaaatgaatcatttaaaaagtggagagctgatgcctggccctctgtacttgtttctctcagggaagaaaggcagcagaaagtagagcagtgtcccagtccacacgtgtccagggaagagaggcttctatttttaactgcagttacacaagactgttggcttttatgtttcagacgcagtgctgtgaaagaccatgtccttgtagttttcattatttcagaggtaaaatggaaagcaggagtaagagccccaatcattaagaacacggcttagctctctgcagatcacagactcagccaccaactcctgccctgtaaccatggagatgcccccacttcagtctgtacacaaccccacaagaggaaccacttactcgcttccttttctaatcagcatgaaataatatttttcataattattatctgaggcttttctatttcctcctctctatctactttgacaacataaaaatatattagggcctggtcgtggtggctcacacctgcaatcccatcactttaggaggctgaggtgggaggatcacttgagcccaggaggtcgaggctgcagtgagtcatgatcatgccaatgcactcagcctgggcaacagagtgagaccctgtctcaaaaatatatatatatacacatatgtattaggcattatgctgtacacaaagagcttattatctaatacacatgataatatctgtcactagatgtaagctttatagagataccaatttttttatccaataaccactaaccaaacaatgatcaaataaataaatggcaggttatatgtataccgatgtgtaaaggcaaatttatggccaatggttaaaatttactgaaaacaaatttcagctcgctataaaaaagaactagcaatcagagttttcccaaaaagaaacagacagctttaaggcataaaatattcctttctacaggaaatattcaaagaaaagtagaatgcccatttccagtgatgttgcagaattacaaaatgatatgattttgtgcaaaactaaaacatgtaagttttgtatgggggaaaatagcatcgaagaacagaacaaccaaacagcttgtaaaatgcatcgtgaataaaaaaagctacttccagcttaatggaaattggattttggatttgtatttgaagcatgtgtaggatttaaaatgagagagatggtaagagaatacatgccaggcaggataatcttatcaagggcaatgatcaagaaataacagagagaaaggtttaggaaattagaagtttccaaatatgactgaaagaaccaatttttattggaaaatgctgtgagataagagggaatcttggcttgagacaattgttagtgtaagaggactgcacacagcccagaactgggtttctttccagacaaagagaaaatggtatgagattatccatccttaccataaacaacattaaggaatatcttgaaattgtttttcagaaagagctaatattaacctaaatttaaactgttaaataacatcaaagatttactttacaagcacatttctaaatgtactgaaaaactatatttccataataattgattcaatggacagataaatttccttttccctgagtagttctatcatcaactaatagcccttattgcaggaaacgaaaaatctaaacacttttccgaaagtgtcgcgattccccgatcactttccagcgtgaattttcttaggggtgaggatgggaacactaatagtttctctgcactcaggaacctcataaaggacaaactttcaaatcaaataatacagaccaaataaataaaacagagctacatcttgctttgctttacacttcgttctcttccttgtctgtctgcaaaaacctttgcatgattttcattgaaaataactcctgaattgatgcgagattttacttaccctgggacctacccaggcctggtttagatatgttcccatagtcttccctgctcttccgggtactgagttaccataaggataaaccaggcagacagttcttagacattagggctaatttctaatttacccccctgtgtctttcttttatcatcacaaacatgtttggtgtctaatttggtttactcttaggaaaggatggtttggagtacataaaacagaatggttcctcaggcagcaatatgctacagttttagagatcttgtagctctatttttctattaattgatgcaggttttgagaatcaacaagcacattaaaaatagacatcaacactatagtaaaattaaaacagttattctgtcttttgttgttgtttccacattattcagaaagagaaaagtactctttaaaattagaaatggagaacaacaaggaagagaaatctattttgttgaaaaacagcttttggtaatattattcagtgaaagatgaagtgacagacgtggaaacttctagtcaaagtttgcagcttttatttgcattgaatatctatccaagatgaatcatcctagaaaagcagccagtggacttggaataatctcgctcaccatggtttctgccaaggaaggatttctttggcgcagaatgttgggtatttatttggggtcttgaatgggtgaaagagacaaagaacaatttacgagaaagaaaggagaagaaggaatggatccatggacagaaaagatttgtcctcaagggtacatccaagatttgctttaatctgtcatataatggaaatttgaaacagttattagcacaggttcacagcttctcaaaactaaaaaccattgtggaaaagaggctaagcacaaagatgtaagcactaaatgagtataactgctttgcagacagtttcatgtcagtggacatgtgccatttttcttctttttttttttttttctgcccagtgcagctgccacatattattcaatgcacaactttacagggcatcattcacatcttagtaagacatggagaaagacaatgctgagataaagaaaagcagatttccgagagcatcatcagagcctacaaattcagctctgcctggagctgcaaaagtcaaaatattctttttggggatcaagccagcatgaattgagattctgtcatttacagccaatggattcataattctcatagccaaaagggagagggatacttttggttctctgctattttatgagctgaatttatggtccacagaagcattttctactcaaaataactagagttatgtaaagacaaataatcattggtctactctcattatgggaaataagagccataataaccctatgtgtgttttatgaatttcaaatgggaaaaattttgaaaactactaaaaattcataactctacattataaacataagaactcttactttttctatttttactttttaatttccacttttgttactatttttacttattttccttgtttacatttttgcacatgaggaaatcatattgtaagaataattttatgaaattttattctcatttttagaattaaaaatgccttggatttatagtttgaattggctactatttcacaccgtagatatacaatactttataattttcctgattggggatatttttattatttatttccaatttttattattttaaatagcattgtggtaaacatctttaaatatacattttattttatttatatatatatttttattatactttaagttctagggtacatgtgcacacgtgcaggtttgttacatatgtgtacatgtgccatgttgttgtgatgcacccattaactcatcatttacattaggtatatctcctaatgctatccctcccccctccccccaccccacaacaggccgtggtgtgtgaacttccccttcctgtgtccaagtgttctcattgttcaattcccacctatgagtgagaacatgcggtctttgggttttttgtccttgtgatagtttgctgagaatgatggtttccagcttcatccatgctacaaaggacatgaactcatcattttttatggctgcatagtattccatggtgtatatgtgccacattttcttaatccagtctatcattgacggacatttgggttggttccaagtctttgctattgtgaatagtgccacaataaacatacgtgtgcatgtgtctttatagcagcatgatttataatcctttgggtacctacccagtaataggatggctgggtcaaatggtgttgctagttctagatccctgaggagttgccacactgtcttccacaatggttgaactagtttacagtcccaccaacagtgtaaaagtgttcctatttctccacatcctctccagcatctattgtttcctgactttttaatgatcgccattctaactggtgtgagatggcatctcattgtggttttcatttgcatttctctgatggccagtgatgattagcatttaattttcatgtgtctgttggctgcatgaatgtcttcttttgagaagtgtctgttcatatccttcgcccactttttgatggggttctttgtttttttcttgtaaatttgtttgagttctttgtagattctggatattagccctttgtcagatgagtagattgcaaaaattttctccaattctgtaggttgcctgttcactctgatggtagtttcttttgctgtgcagaagctcttgagtttaattagatcccatttgtcaattttggcttttgttgtcattgcttttggtgttttagacatgaagtccttgctcatgcctatgtcctgaatagtattgcctaggttttcttctagggtttttatgattttaggtctaacatttaagtctttaatccatcttgaattaatttttgtataaggtgtaaggaagggatccagtttcagctttctacatatggctagccagttttcccagcaccatttattaaatagggaatcatttccccattgcttgtttttgtcaggtttgtcaaagatcagatggttgtagatgtgtggtattatttctgagggctctgttctgttcaattggtctatatctctgttttggtaccagtaccatgctgttttggttactgtagccttgtagtatagtttgaatacaggtagaatgatgcctccagctttgttcttttggtttaggattgacttggcaatgtgggctcttttttggttccatatgaactttaaagtagagttttccaattctgtgaagaaagtcattggtagcttgatggagatggcattaaatctataaattaccttgggcagtatggccattttcatgatattgattattcctatccatgagcatggaatgttcttccatttgtttgtatcctcttttatttccttgagcagtggtttgtagttctccttgcagaggtccttcacatcccttataagttggattcctaggtattttattctctttgaagcaattgtgaatgggagttcactcatgatttggttctctgtttgtctgttattggtgtataggaatgcttgtgatttttgcacattgattttgtatcctgagactttgctgaagttgcttatgagcttaaggagattttgggctgagacaatggggttttctagatatacaatcatgtcatctgcaaacagggacaatttgactttcccttttcctaattgaataccctttatttctttctcctgcctgattgtcctggccagaacttccaacactatgttgaataggaatggtgagagagggcatccctgtcttgtgccagttttcaaagggaatgcttccagtttttgcccattcagtatgatattggctgtgggtttgtcatagatagctcttattattttgagatatgtcccattgatacctaatttattgagagtttttagcatgaagggttgttgaattttgtcaaaggccttttcggcatctattgaggtagtcattggtttttgtctttggttctgtttatatgttggattatgtttaatgatttgcgtatattgaaccagccttgcatcccagggatgaagcccacttgatcatggtgcataagctttcggatgtgctgctggattcggtttgccagtattttattgaggatttttgcattgatgttcatcagggatattggactaagattctcttttttttgttgtgtctctgccaggctttggtatcaggatgatgctggcctcataaaatgagttagtgaggattccctctttttctatttattggaatagcttcagaaggaatggtacaagttcctccttgtacctctggtagaattcggctgtgaatcatctcgtcctggacttttttcggttggtaagctattaattattgcctcaatttcggagcctgttattggtctattcagggattcaacttcttcctggtttagtcttgggagggtgtatgtgtcgaggaatttaaccatttcttctagattttctagtttatttgcgtagaggtgtttataatattctctgatggtagtttgtatttctgtgggatcggtggtgagatcccctttatcattttttattgcgtctatttgattcttctctcttttcttctttattagtcttgctagtggtctatccattttgttgatcttttcaaaaaaccagctcctggattcgttcattttttgaagggttttttgtgtctctatctccttcagttctgctctgatcttagttacttcttgccttctgctagcttttgaatgtgttttcccttgcttctctagttcttttaattgtgatgtcagggtgtcaattttaaatctttcctgctttctcttgtgggcatttagtgctataaatttccctctacacactgctttaaatgtgtcccagagattctggtatgttgtgtctttgttctcgttggtttcaaagaacatctttatttctgccttcatttcattatgtacccagtagtcattcaggagcaggttgttcagtttccatgtagctgagcagtttggaatgagtttcttaatcctgagttctagtttgattgctctgtggcctaagagaaagtttgttataatttctgttcttttacatttgctgaggagtgctttacttccaactatgtggtcaattttggaataagtgcaatgtgttgctgagaagaatgtatattctgttgatttggggtggagagttctgtagatatcaattaggtctgcttggtgcagagctgaattcagttcctggatatcattgttaactttctgtctcattgatctgtctattgttgacagtggggtgttaaagtctcccattattattgtgtgggagtctaagtctctttgtaggtctctaaggacttgctttatgaatctgggtgctcctgtattgggtgcatatatatttaggataggagaattgatccctttaccattatgtaatggccatctttgtctcttttgatctttgttggtttaaagtctgttttatcggagactaggattgcaacccctgcctttttttgttttccatttacttggtagatcttcctccatccctttattttgagcctatgtgtgtctctgcacgtgacatgggtttcctgaatacagcatactgatgggtcttgtctctttgtccaatttggcagtctatgtcttttaattggagcatttagcccatttacatttaaggttaatattgttatgtgtgaatttgatcctgtcattatgatgttagctggttattttgctcgttagttgatgcagtttcttcctagcatcaatggtctttacaatttggcatgtttttgccacggctggtgctggttgttcctttccctgtttagtgcttccttcaggagctcttttagggcaggcctggtggtgacaaaatctttcagcatttgcttgtctgtaaaggattttatttctccttcacttatgaagcttagtttggctgaatatgaaattctgggttgaaaattcttttctttaagaatgttgaatattggcccctactctcttctggcttgtagagtttctgccgagagatccactgttagtctgatgggcttccctctgtgggtaacccgacctttttctctggctgcccttaacattttttccttcatttcaactttggtgaatctgacagttatgtgtcttgtccactccagaccctgtttgcctgggtatcagcagcagaggctgcagaacagtgaatattgctgaacagcaaatgttgctgcctgatcattcctctggaagtttcatctcagagggatacctggccgtgtgaggtgtcagtctgcccctactggggtttgcctcccagttaggctacttggggtcagggacccacttgaggaggcagtctgtccattctcagatctcaaactctgtgctgggagaaccactattctcttcaaagctgtcagacagggacatttaagtctgcagaggtttctgctgccttttgttcagctaggccctgcctcccaaggtggagtctacagaggcaggcaggcctccttgaccttcggtgggctccacccagttcgagcttcccggctactttgtttacctactcaagcctcagcaatggtgggtgcccttcccccagcctcgctgccgccttgcagttccatctcagactgctgtgctggcaatgagcgaggctccgtgggtgtgggtccctccaagccaggcacaggatataacctcctggtatgccctttgctaagaccattggaaaagtgcagtattagggtggaagtgtcccgattttccaggtgccatctgacacagctttgcttggctaggaaagggaatttgctgacctcttgcacttcccggatgaggcgatgcctcgccctgcttcacctcatgctcagtgcgctgcacctactgtcctgcacccactgtccaacaagccccagtgagatgaacccagtacctcagctggaaatgcagaaatcacccatcttccgcgtcgctcatgctgggatctgtagactggagctgttcctatttggccatcttggatccacccctaaatatacattttaatttaactttttatcgtttcattaagacagcatcctcgaactggaattagtggttcaatgggcaaaacagctttatagcctgttggttccttgtctgtcttaatagcataacaccttttaaaagctttctaaattccttatctctactccctaacccctttcttactcaaaacccagtccaggcagatttttatccctatccttgtatcagaatcactttgttaaggtcacaatgggtttcatagcctcaaatccaatgatccattaccatgttttatcttactgaatttctcagaataatttgacaatttggttattctctccttgaaacattatctttgcttgagtttggggattccacactttcctggtttgctttcaacctcacaagccactccttttctagctcaccttcctcttgctgacctctagatactgtgttgtctcaggactcagtcctcaaacatatatgccgtctacatgcactctctaagtgatttcatccaggaatatggctttaattaccatccatacattgatgactcccaggtttatacctccatccaacccctctctgttgaaagccaggctcatatatactataatctatataacatctttgccagatgtctgtctggcatctaaaatctaagatatccacaacataccttattccctcccttacgctcatccctcactcttccccatctcaagaaaacagtgatataattcacccactcgctatagccaaaaatactggaatcttctttaattcttctctttcccccataccccacattgtcaacaaactggccacataagatgtgttttctgtcagaaaaaaaagcctgacttcattttttaattcaaataagaatgttacatgatgggttccaatgacaacccagtcatttcataattctaattctaaagtaggtagatgaatatggtaaggaaccttgcattgtggctgtcgccagttgaaatatattcctgttttgcaatatttcttgcttagcttttaagggctctcccgcagattccagaagctaataaattgtctctttatttggcagcttgggaattttttttttagcaccctggaccaatgcaccattccggatggttgagatatatactttttctttaaggggtaggaggtaagggtgatgttggaaagagaaatgggaaagaagcagcagcttaacatttggaccctgaagcatgttctagagcaggctggttttaagaaagtcctcatttgcctcaaggtacgtgaccccagtttaatgactataggcctaaatgggacaggatcacaatcacatttgtcaccagcagactcatatctaggaggcatacaagttattcctgttagaacagtgacttactggaaagtcatttcccaccactgatttgagtcgctgttattatcgtacatgaatttccatatacaattaggccatattacagatttgctattccatttaactaacctgtctgcctacccttaattttcacttaagaattttctttctctttcttttcacttctgtgcaatagaaaatatactcttttcttctacattttcttctgttttttttgttttggcataagaatgacaggaattttttaaatgtttaattgtagccaatcctttgctagtggtctttgtcctcttttaggttttctgatgtacagtcattttatctacttacatgcagatgatgttttatctcttcctttccaattcttatgcttcttattgtttctctgggctgactgcattagcaagtagcttcaacacaatcttagatagcagtagtggtaatgaacatctttttccttcacctactttaataggaaagcctctagcactttcccataagttggtgctggtttgggattacggtgtatgcaagttttatgtgatatgttaaagaattagttattagtttttatttttcaatgttttaacatgaatctgtgttgtattttgtcaaattccttttctgcatcaataaagataatcatatgattttttttcttggctcttgtatcagttattaagctactaactcttacctacaattgcttagctcctatacctcgcttctagagtagtaactgctgatgtcaatcatacactggcccctagagctagttgactttttaggtgtgtttttcttctctctccaactggataattagcatattctattttgtacattttattaaatgtctccacagggttaagtgaatttgttgaggtagtgacactcaacatttattgtttacctgccacaacccctgtccatcattgctcagtaaaatcgttaatcatctatagctagacatatacctgctagtacctacctagaatgttgaaatcacatacctgagataagagagaagaaaaattccaaggagaactctcatgtaaatgctacttcctccaagcatctaaaacagctcctctattctttctaggaaaaaaaatcccttctttgaggacattcctggtaagtatcctcataaatagaaaaaaaattttacaaagagaactaaagttttgctagcatttctgtggtttcagacttaatgtgatgtggggatgctctgattgggaaaaagaaagatcataaggtttctagggaagtgtaccagtttacaaatagccagattctccagtgaccacctcatgtgtctattgtttttttctcaagcagaaatgtgaaaacaggagaaggtagagtccagtcttacccaaaccctgcatgtccaggagaaagctaactctagtctaagctacaaaaaacgaaaaaaaaaaaaattctccttgttttacataatttcatacacaaaaaagaatggaagagtaatatccacaattaacatcaaagatcctcttattcttcatagactcagtgtagaggctcagacacttatgtcatgaccacagaaagaaatgaaggaagaaaagaatgaggatagatttgctagggccagggctttacccaagaaatatagctgagaaaatgtgggagggtaataggtaggcacctatgctccacaggatgagacctggatgcaaagaacagatgagagctttcttccctatcctctcctcatcttgagtccctagtcattgctgcaagtacaggaaaccataaaacagagtttcagaaaactaatatgtaaaacatgagaaattaccagtgtgcacaggtgcccagagctaaatataaagcacttggatatttgcaaaagcactagcatgctcagagttagccagttactagactgctttctcacacctgaaaacatcctaaaagaaaggatactacattttcctcctttgtctttttaacgagaatttggaaaaggtctaactcttttaacttatttaaagctgctgagattgagacatataatacagctctggtagaaaaataatcaattaagggaaataatcagatcttctctcaacctattcctacccccctcagaatgtactacagtgccatagaggcaaaaagcctgcataattctttaaaggtgaggggagtgagggagtttcaggtgtaaaggattttcagacagtcataactggagaaactttccttttaacactgtttgctttctttcttttttgtttgctcctcacctctctgtatgttccgtctacctttcatttcaacataacgagttactttatattaagggggaaatgaaaaaacaatttttttgagttcagaccacctgggggcagtgcttcctttgacagaggcactgccagaaactagaacaaggggaagggaacagcaggaggagggcattcaatgatgtgtgtgatgtaacagtgaggttttgattatccgtaaaaacaatgaagattccccaaaggctacccaaccaacagaaccagaagactctagaacagtgaactaggcccagtgaacacggccaaatctaggtctccaaactgaatccacagaggctccaggaaaaggaaagaatggaaactccactgagcactctgctgctgctcctctgtgtgcagctgacctgtgagtcaggcgagtcatgaggaggggaggaatcaagtaggggcggccagggcattgaaatttagaaagatcccggggacaatcttgggtctagtctcaggaatgtaaaacaaataatgaaactgatgaacaaacacactatatatatgaaaatgtttcattcctcctaagcagggtcaaatggacaactgccagtggaacagaatgctccttccctgaaagtcaaggaaggtgacagcgtcacactgaactgcagttacagagacagcccttcagatttcttcagtggttcaggcaggatcctgaggaaggcctcatttccctgatacaaatgctatcaactgtgagagagaagatcagtggaagattcacagccaggcttaaaaaaggagaccagcacatttccctgcacatacaggattcccagctccatgactcaaccacattcttctgcgcagcaagcacacagtgcccacagtcacctgcacccggtacctaaagcttgctgaggggcctgggcacacctccttttataagggccctggggcactgactataactctgctgcatacaaagggaaatatgagggactgttttataacataatatcaaacatttcatttgaagaccatgtgaggaaggatagtgttttcaaataccatctaaagtactttgtttctcagtgtgaggcccttcctttgtgaaaactagcccaaaaactagaggctaaatatcaaaaaggagagagcactaaagaacaaagaaagaacagggtaaaattcttgtctttgagcttctttgtagacttttacaaagatatagaaaatacaaaatcttgaaagccatgaccatcaaattcagtagtgaaaggaaaaatattttgacatgccaaaaagattggcttagaagatcaagtaccaaaatctgagggaaaattgtacaaagcatttaaaggaaaagagaacacaacatggtagaaaagctgtcttctccttaaaagggataaaatgccaaccagctagctagaaaggaagtcaatgatgtgaggagaggtcataaacagtgagtccagcatcctgctcttttctagggtcagagctctgagcaggtagggtgggaggagggtgagtcacatttagcaatgactctgaactgaaggaacagtgaattttggaaaaaactgttttgatcattgtgtcttatatcaatactcacaagaaaacgcccattacagaggaagcattcaacaaccatgtggacaagacggtcggtccaaagcatgtcagccagccagagaatgtctgtgcttgtcaatttcttgaacaatagacccatgaatagattagctgaggtgacagattgagtttctttataagcccagaagcatgggttttctcccaccaagacagattcagctacttctgctgctgtcacaggacttttccttagttcaaagacagggttcttttcccatgggcacgaaaattcaggctcgcaaacaatttgaatggtgagtaagacacggttttattgggtgaagaggaagaaaagggggaaacagggactcttacaaggccagagtccctgctagagcacttcccaccccgcagttcgaatcccaggttccacacaggaagaggaggagcctggctcctccccactgcaaaggatgccaacttctgcggctccaccccagtgcacaggctgcttggaatttctctagggaccccctcccacctggctgtctcactaccaaatgtccaccctgtcagcagtaaatacaacactgagccttcgatgtggaatcatccttcaaaggaaccagccacacactagttggcaagttgattacattggaccacttccaacctggaggtattaggaattttttttcttcttaatacatattctgggtgtgaatctgtggtctcctccaaagtgccacacatagttgcatgaactgatggctcagagtgtctcattgatcattctgatcatcaaaggatttcacatcccttgcatcaacagacccactttatatcaagggcgtgtgacagtagtcatgtcatatagcatatagcttcatcatacagcattagccatgaaccactagcctgatagaactttggaatgaccacttaagggcccagctaaagcaccagcttagggacagcaccctgaggggctgaaaagctattctttgagatagtgttgtgtccctgttacataaaatacatggacctgggtagcaagggatggaagtaggactatcaccccatcaaccaccactttcagtaacccacttttgtgcttcctgttcttataactataggttctgctggactagggattctgtttccctttgagggggaaaagggaggatgctgcttctacgagggaaataggtttttaccaaacccaagataatatatactacctcataatttggggatcttcatgccagtcctggaggccaagaaaggagttactactgtcatggacaagttgatcctgattatcatgaagctaaaccccatagcggaactggggatatatgtctacaactcagggaattcactgtgatgacttttagcactttcatgtcagtgattatcgtaaataggcaactgtagcaactacagcctgacaagagcagactaaccaggggcttatacccctcggtgatgaaggtctaggttacctccctggaaaagaaatctagagcagtagaaaaaaatgctagccgaaggtggggagaatcaagaataagtagtatagaaggtagatggaggagataataaatatgagttgcagtcatgcaactaactataacaaacgtaacttgtcccagtaaccctcttgttgtcaaaacaacatcaacaacaaaaactagtgatctatatgaatttaacacacagcacaagtggatctgagcaaggcaaggagtgaactgtatagatactgttggttccctacctatatctcctaggcagtcacgccaacatgctggacaccactcgctgaaaatcccagcaaccctgaagatgactttgactttctggccatgaatgtggaggctgtggaggacaagccagaaatgcaaaagagttaatgccccaaaagcagttcttaatcagtgatagacagggagtttaggcatgattactccagtttcttcatgactcatttggcatagctccaaagagtatgctatgctgtctcttagagttattgtgacaggtagttagacaggcatgaatggggcacaagagagctctcccctccacccaccaggagtcatcaggcgattgttcggcagttatcacattacctctctaaaaatgataattggcagcaaattatcactggcaacttccccaacagataaagacacttaagattggtaatcagcttccaataaaatctcaggaattggtgagtgaacccagcatgtacattaagagacaaaacagcagagtatgaccttctgtgggcactccaccagaaaaaggaagaaagcctcagatgtgcatgagtacaacttcctaaacacactgctcatgcccacgtcccaagcaggaaggagggcactgcacatgcgggcagcccatcctaagggaagaatcatgggaaaggggcacaagatgctggaggtaggtcagtgtataaaatcttaggattaaggttaaaggctgcacttgtccttccagttgtccgcttgggtctcttccaagtgtactttcctttctctcctgctctaaagctttttaataaaattccactcctgttctgaaatttgccttggtctttcattctgccttatttccctcagtcaaattctttctgctaaagagacaagaattgaggttgctgcagacccatatggattcaccaccagtaactcagaaccttctacctctaacattatccagctgcagaaagctgcaattgcccatcgtggtaactgccttgatggcacattctgtattggcttccttccttccctgatttacctcttacccatgttttgccaacaaaaaagagttaaactctgtaaaatagttaaagaggttgattctgagccaaatatgagtgaccatggcccatgacacagccctcaggaggttccgagaacatgtgcccaaggtggtcgcagtgcagcttggcttatacattttagggaggcatgggacttcaatcaaatacatttaaaaaatacattggtttgatccaggaaggtgggacaactcaaagcaaggggcaagggggtcagtgggagtgaggagcttccagcttataagtagatttaatatttttctggttgacaattggttgagtttatctaaagacctggaattaataggaaacgtctgtattgcgataagaggttataaagaccagagtttgatcaggcagatgaagcttccaagtagcaggtttcagagagaatggattgtaaatgcttcttatcagacttcaggtctgtgttgatgttaatgccagagaggtatgatgaagcatgtctgacccccacttcccattctggcctgaaccaatctctcaagttgaattttaagagagccctggccaagaaggaagtccactcagatggttgcggggggctggggggccttagaattttatttttgatctacagtttcctagaatcacctataataaactatttacacacaaattattgtgtcgaagctgacttttagggatccaaaaccaagatacaggaattcaaatcatgagacaagggtgaagattatccagaagaaatgttggtgccccttctcttattgctaccaagctgagctttgcagcacaagggattttagcagtctcattcaggatgggccccagtgcttacaaactccttaagcatctctctgagaggggacactcagccacctacctctgtgacagagaactcatgctcctcacacagcacccagtacataacagggcccccattcataatgcccagtttggggaccccaactcaggaattacataaggatccctgatgctccctctggaaatgcaaaattctaaagaatcagagtaaggtatttaaaaagagtttttttcacaatattttttcaaaatggaatgaaaatgataagagcaattcttgatataaatataaattaagctgaggcaatttagtgctgatgagaacttctgcaatagttatttcagagcttcttgatatagcataaacaaggtggttttgtttatttgtttgtttgcgtttgttttttgagatggagtttcactcttgtcgcccaggctggagtgtggtggcacaaactcagctcactgcaacctttgcctctcaggttcaagcgattctctgacctcagcctcctaagtagctgggattacaggcatgtactaccatgcccagctaatttttgtatttttaatagagatggagtttaaccatgttgcccgggatggtctcgaactcctgacctcaagtgatctgcccacctcggcctcccaaagtgctgggattacaggtgtgagccaccatgcctggccaacaagattatttttttaatccatgtaaaatgtgaacacaattacacactacatattctgcttttacttatctctgaatttagtcgatgctcttttcagccacaagcatatatcttttttctcattctttattttgagaaattataaaaatgtaaaaaaattgaatataaataggcatattcttatcactcaaaattaagtgtccttatttcataagatttgctttgtaattttttttaataagaagaaaaataaaatcacagtttgccatttgttgtgaatggagtcagaggcttctgctcaccattctggatcacgctctcctctccaagattaggtcgtattaaaaacaaatttgccagctccattttctctttatttttcttctaggctaactaaaagcactccagaaacattttttattttcatttgaaattataaccagaggcctattttctgagagaccaaaaagtattcagaaatgtttccctccttgaaacctagtcacccacccacctatcatagcatttcctgccctgaaggagaattctcaccaagcacagaggagaacccatcagagcaggagacttttcactctgcaggggagcgctgtcagcatgacacgagttagcttgctgtgggcagtcgtggtctccacctgtcttggtaaggaagatgtggttctttctttataaaggcatctaatggggctgtgaagcaggagggattaacagaacagcaactgcattgcctcttagagcccagctacctggaggcagaaatatgctgcctgaggctagaatcacaaagaaaggtgtgtgggaatggggaatgggaatcagcttgtgagtctgtttctcactcacacgtgatatcccagtgaagtcctttctctcctattttccacagaatccggcatggcccagacagtcactcagtctcaaccagagatgtctgtgcaggaggcagagactgtgaccctgagttgcacatatgacaccagtgagaataattattatttgttctggtacaagcagcctcccagcaggcagatgattctcgttattcgccaagaagcttataagcaacagaatgcaacggagaatcgtttctctgtgaacttccagaaagcagccaaatccttcagtctcaagatctcagactcacagctgggggacactgcgatgtatttctgtgctttcatgaagcacacaatgagatgagcagcagggagaggcttacagaaacctcagacctcagcatctgtgcaaaggtcacagggtgagagggaagtggtagggtaataggtatagaaaatcattgacttctcttggaaatgaaagcttctcctatttcttctcctgtaagaaactcagagagatggctgtctgcaagcttcaatccttaaagttacataaagataatgacgtgtgcagtgcattccagttttacaaggtgccttcactaaggtacttattacaggtcagatttcctaagcattttctctgtccagaaaatttttataatttgcctgggcattcttacctccaggaattttaaaccttttccatttgttaattgttgcttgtccttttatttgtccatctggtccaaaactgcatctcctccgaataaggtacccattttagaacacaacaggtgtgacaacggtggcataaccacgaaggggacttgctgggcccaccagactcaagagatgacctaggtccactgcagtagaacctagaagaatgatgaaaaggctttaaaatgctccgctgaagggccagctcgtgggcaacacctcagtggttggaatgctatgcttcagaaaatgataatattcgttaaaccactggctgattcatggtgtcgtggcaaaagtttagaaaccaagaaatagacatagaatagagtcttctcctatcactccctataagtcattttcagaattcgtgtttccctttcccacaaccctaggttctgctagattagaggtcctagttcccaaagaaggatgctcccttcggggattcagtaacctgcagctatggctgccacttttaggtcactctgaactctctgtgccaatagcccagcaggcaaagagaggagctattagaccagaaggggtcattgaccctgactgtcatggagcaccaggttgttgtgacacaaggagggtgaggaggaatgtggctataatgtaagtatttcacattggtgtctcctgatgtttccgtgcccaatacaaacagcaagcggcagttcttgtagcagcaaggcctgaaaagggcaacgtgaccaagaactgagactcttcagcaatgaagttttcaagaacagaagctcatgtcatgcaaccttcctgtattaagggcgttgaagagattgcagtcagaggcaaccttgaagacacagtgacacagtggaaataatatagggcaagcatgcatctgagtagtgcaaagaaaggactgtaactgatatatgcgccctgttgccccatccgaatgtctgtctgattttagctggagttatagtagacaatcacactcacgtcatgctggtaacatccagcgttaagcacactctgtgttttgttatgttatgttttgttttgttttgttgctttctatcccaaagtcttctctaatgtctcaggagatcccttagtttaagggcaagcacagcctgaaattatagggaaactaccacccctgttggcaaacaccaaccaatggggaaaaagagccagggaataaacgcactagctttgcgtcccttaaatagacaattctgagcggcaacctgtgtgcttcttgggagatcctaccagaaccgagtcccacttgagtcagttattgctcgacccactttcttcttttataacttatttttatagatcaagggagtacaagtgccacttttgatacatggatatattgtgtagtggtgaagtatgggttttcagtgtaaccatcacctgaatagtgtacattgtactcattaggtacttttcattcctcattctcctcccacactcccaccttttcaagtctcaatgtctgttatctttgtccatgtctatgcattatttagctcccatttataagtaagaaatgtagtatttgaatttctgtttctgagttacttcacttaagataatggcctccagttccatccatgttgctataaaagacatgagtttattctttttatggctgagtagtattccatggtgtgtgtgtgtgacattttctttatttaatcatccatccattgatggacacttaggttgattccatatcttttctattgtgaatagtgctgtgataaacataacagtgaagttatatttttgatataataatttctttttgtgggggtagatacccagtagtgagatgctgggttgaagagtagttctatttttagttctttgagaaatccctatactgttttccacacaggttgtactgatttacattcccaccaacagtgtatatgtgttaccaaacatctgttgttttctgacttcttattaatagccattctaactgatgtgagatggtatctcattgtgcttttaatttgcatttatctgatgattagtcgtgttgagcattttctcatgtttgctgaccatttgtacgtcttctttgagaaatgtctgttcatgtcctttgcacacttttcaatgggcttatttgtttcttgcttgttgagttgtgtgagttccttgtagattctggatattagtcctttgttggatgcatggtttgcaaatgttttctctcattctgtaggttgtctctttactctcttgattatatattgtgtggtacagaagctatttagtttaattaagtcccattagtctattttttgtttcgttgcatttgttttaagatctcagtcataaattctttgcctaagccaagatccagaagagtttttcccaggttttcttacagaatttttatagtttcaggttttatatttaagtctttaatccatcttgactttatagtaagagaaatggatccagtttcattcttctgtgtatggctaactaattttcccagcactatttattgaatagggtgtcctttccccagtgtatgtctttgtctactttgtcaaagatcagttagttgtaggtatgtggctttatttctgggttccatattctgttccattgatctgtgtgtctatttttcatacaagtaccatgctatattgatactatagccttgtagtatcatttgaagtcaggtgatatgatgcatcaagatttttctctttgcttaggattgctttggcattcaggctgtttttttgtttcatattgattttagcattttttcctaattctgtgaaaagtaatattggtattttgataggcattgcattgaatctacatattgctttgggcaatatggtcattttaataatattgctttttccagtttataagcatgagaggttttttcatttatttgggttatccacaatttctttcatcagtgttttgtagttttcctagtagagatcgtttacctttttgtttaagtgtatttctaggtattattttgtggctattataaatgggattatttattttgtggctattataaatttagtttgtagcttggttgttactgatgtatagaaatattactgatttcatacattgattttgtatcttgaaactttactgaattcacttatcaaatctgggagtcttttggaggagccttgagggttttccaggtataagacatatcatcagcaaacagatagttggactttttcttttccagtttggatgccttttatttctttctcttaccaattgctctggctaggacttctagcactattttgaataaaagtggtgagagtgggtatcctgctttacccattttctcactcctgcttcctgagatcacttcctaaataaactacctgcacccaaggtagtttcaggctctgtcttggggggaaatcaaactaatacagggaatctttggaaatccaaagattctttgaaaatttaacaaagaaagaacagaggagagttcaaggtgaaccttactgggctaagctaataaaggtaagtgtgtacttgagtgagaaattgtaaaaaaaagatgatgaggcagatcgcatttactaaactccaatctctgcagatatgtgattacgtcttttcagtgttcaaaaactttactttccaagtttaagctctttcaactgtctctcatttccccttcccaaatcttctgaccctttactatttaaacttcattcctagttattcccaaaatacgtctctcttctagtcagtttattccccttactggctcataaggacttaaagctcattgctggctctagcatttctctactggttgctccacccacccaaatttcccttttgtgtatatttcagactgcttaaaccatattaatcttataatgaccaccagaaatctctcttccctctaagatttcttctctaataatcaaacaatcctttaattccttctcttccaaatgtcatacagtaccaactgtggaccaaacaatccgactcttactgacataccttcctaagacatttgctgttgtttcaaggtactcatctttcctccccaaatacattatattctctatgtagatagagtttgccttgtacccttcacaattcctcactgctcttagcacagtactaagcacataataagtgctgataaggcacaaatatgcttaaggtttaaattataatcatgctatatttctgaaagaatatgaaggaaaagaaacaggtttctctgaggaggtaagatgtgatagaaggtagaatttaagaaagcagtgataaaggaaaggacagatacatttcaaacatccaagtcttttgatttagtggaaacataaatctgaaactggtaaaaagattacttttagaatacatttcttactaaaccaagttctttccatacagaaaatcctagaaactgcctctgtaattatctctttgatctgaagagggcactgtttgctcctgttgatagcagttacttacaaaaaaccgatctcattttgaagaatccgctattcctaatacatacaaaataactagaacaaatcctatgttatccgtagagtctaggtcagatttccacattctggaatcaagttttccaccaattaaaaaggtcaaaccatggaggagcttttaggaactgtatttgtgatctggtggctttggcctgggtgagagctgagtgaattcatttcatcagggacacagaggactcagaaggttctgagaactagtctctatattttacagaagggattcaaagaataaataaaacatttaatttaccctttatttaatttacccttaattcatcttttttaagaaaatttgctatcaaatgaaggaagaggaatgctcttctgaccatctgtccagagagacacaaccaatctctgttctccagagagacagagccaataggatgaatatatagatatatgagaggggatttattagaagaattggctcatgcaattatggaggctgaggagtcccatgacagactgtctgcaagctggagaacctgggatgctggtagtagtgtgactagtccaaatccaaaagcctgagaacccagggggccactggcataaatcctacagtccataggccagagatcccagagttcttgtgtctaagggcaagagaaaaagagtgtatcccagctccaggcaagagaaagaccaagttgcttttcctaggtttctgttctatccaggcctctagcagattggatgcccacactgaagatggatcttccccatgtattccactaagactcacaagccaatgtcctctagaaacaccctcataaacacacccaaaaataatgctttaccagttctctaggtattccttaattccgtcaagttgacgcctaaaattaactatcacaccatccatgaaggaaagatgttttgtcatctactataattatttgaacaatgtttcagatccatgggacagaatgaaaaagatctagaataaatctgatgtctttgtttctgttcttgttaactagggttttgtagtgcaggggaagataagcagcctccttcagtgctagtaccagctccctctccctgaaccacaagaccacccagtcgagggacttagccatctatgtctgtgctgcagggaacctacatgcccctgaaagcacctaaatgcaccaccccctccaccctgcattgggacctccactcaggggttagtaaaccatcttcatcacctcctctgaccaaaagaatattgtaaatgaatgtaacaaatcagagaaaatcttttctaaaagacttttagaaagctttttgttcactgtattatcagataaggaattcagagtcatgagaaccctgatcatgagctgtctgaggtgattaggaccagggaccctgagtgttctttcgtcaagacccactcatctaagaggggctgtctcaatgattggagcggcttctcccacttgtgccattaattgctggtatgcctcagtttttgcatctgtaaaaattctcccacgagaacctgagagtaggcgtgtgatactcacatatttttctcctagtttttactttttatagtctaactagctaactccagtaagaaatcccatgatggtagttgccagatagggttgatatcccaagggagcacagtaaaatttctcagactgcccagaaggggttctgcttccacaaaaaagcagccgtctgcccaccccacccgtatttgcccacttgcaagttcttttatatacatcgctttatttggtcttcaatgttcaataatttgattaactgtggaagttggaactgattgaatgataaatacaagatactaaagttctgattgcataggtcccagaggatcacaaaaaagatctaaagtggcaagatctatctatggccacaccaccccaaatgtgcccaatctcatctaaaatggcaagatccattcagcattgcagcactggaatccccagtcagcattgcagttgcaggcccagtgagcccaggcaagaggcggaaaacatttactcttgagaccctaattagtgaactcatagatagctgcagctggcctgagactgggagagaagacagcccaatcgtctggagcttcctatacagactagagagtggtggcacatgcctgtagtcccagctactcggaaagctgtggtgggagcatcacttgagcccaggaggttgaggttgcataattgcgccactgcactccaacctgggtgacagagtgagaccctgtctcaaaagaaaaaaaaagagaggagaagggggtaaattgtaaaataatagcatatttgccaatttcctgtgaatttgtccagaaaatagtaggtagtgcagaaatttaacaccacgcaaacaagaaaagtagaccacctatggaagaaactcaacatgctgtactttaagaagtcctccggagttaagaacggctgtggcaaaatgcccactgttagcaccatttccaagtggaaataataaatgggaagggagagttaagaccaccactccctatacggcaagtcagcttttaatttagtcttttattctccttcttgttttacagggggaaaagtttacataaagctgaactatacagaagccttatctaagattggatgacacaaattaaatagggagagaaaattaatgcaaatgaaactagtagttctctgtattgtgagttttcatttttgctctgttgcctcttctataaaatgcagactaattcctgacctttcctccctcaaagaagaatgtgtgcatgaggaaaaaatcagatgccaatgaaaagctgtcagatgtgcaacacagaatgttcccaaatgaattttatgttgattgttctgagtcttctttcacaaagtcattaacagaagctcacaaaagcccttgccaccagtattgtagagctccttgacacagccaaaatcaggtattctttttttaaaaaagaaagtcttcagcaaattacagtataattagatatcaaaagtctggtttcaattttctctagactatctgaatgttattgttgttgtcattatttttcatcatttctcaaagtattaaaatacaatttggtcaaacaataatataaccaatacctgtattatcataacccagagataattttctgatattggcttcaagacagaggagggaaagaaaaaaaggaaagaaggaaggaagaaaaaaaaaaggaaaaaagaggagtaaggggaagggaaagagaaggaaagacgggaaggaaagagagagaaagagagagagaaaggaaagacaataaaagcttatagagaaaactgaagtcacagcattagcttggcctgtcttttccccacccatctcattctcctatccaaattatgtctttaaaaaacaatgtatcagctccctttcctcttcatgtttattcccaaataaattacagttccaacaacatcttttttcgttaaatattatggtccaagttttattctctgaagcaaaagacaaaaagtatcgaagagctttccctaagggagacatcataaacagcccacctgacatcccatttcctgttctgaagcagctacggcaccagtgcagctgatactcaaggttcagatcagaagaggaggcttctcaccctgcagcagggacctgtgagcatggcatgccctggcttcctgtgggcacttgtgatctccacctgtcttggtaaggaaggcgcatgtattcaccttaactagtattcaatagaacagagaagtgggaagaaagattaatagtgcaagaatctaatctcttcactgggcccagctattaggggcaagaaagctgatggattttgtcagaggtttggatcaagaggaagaaaggcgggtggcaatgggaacaggcttgtgagtctgtttctgtctctcacatggtatcccagtgaagtcctttctctcctctttcccacagaatttagcatggctcagacagtcactcagtctcaaccagagatgtctgtgcaggaggcagagaccgtgaccctgagctgcacatatgacaccagtgagagtgattattatttattctggtacaagcagcctcccagcaggcagatgattctcgttattcgccaagaagcttataagcaacagaatgcaacagagaatcgtttctctgtgaacttccagaaagcagccaaatccttcagtctcaagatctcagactcacagctgggggatgccgcgatgtatttctgtgcttataggagcgcacagtgagacaagcaacagggagaggcttacagaaacctcagacctcagcatctgtgcaaaggtcagggggaagtgttcagggttataggaacataaagaggaaataattgtcttccctaaagaaaaaaaaatgtatctgactataggaaacacagaggggatgtctataagctgtaatttttgaaatagtaataaaataatgaatccacacatgccttatagattttcaaagtaccttcacatgttaatccattaaacctgcataagcctgtgtgttacataggtcagatcagatattctaaggatcactgctatccagagaatcttagagcttgacctaaagctatattcttttagaattatatatttttgctttattattttaattactatctatctgtacatcccatgatcatatcaaagtcaatatatccaaaactgaatttcttaccatctccacaaacctttattttttcttcatttttttctcctcagccttgctcaagattcaggaacacaataaaagtttgctattgctgggtttccagtttggggaatttcttcaccctcgactttccagcctgggctatcagatttttatgcataccttattacattctaattataaaatggtgcaaaaaaaaacactacatcatgtcagtctcactgtttcccctctatccgtcattctttctgactttaacctggcttaatcctgtatttcttaacgttctttaaagcatcatttgtcttgacataagaaagtaaggaaagaaagcaaacgactgtcaagtaggatttcatgtactgctagtactcaccagcaaacgctaaaaaaaaaaaaaaaagaggaagttaacttctggtaatgctataattgcttctggtaaggcaacctagcaggtggtgacaattttgataaacctggtccaacagggagaccaagcagctgccatggtccaagtctccacccctatgtcttctgagaattgggagatgcctggaccgtgagaggattctcccttatgctaagggaaaaattaaaataaatgaaaaaaataatgccaacatttctttttatgcccacaattcccccaatacatctccttcactattaagccccttgtggagcattttattccatctgctcactgtgggtggcgagaggaagtttggaatgacaaacagccgaaataattaagtccaataagcaggctccagagcttaggctgggggtctgtttggaatgagtggtgagagtgactggatgtggaagagggtaaggggaggccaagaccaaactgcagaatcataattcagattgccgagtcatttcccaaacacagcagcttcagtaacgccacaccctagcccagcttagcacccaggcttctgcttgtctgaaaaagtggggtaggcaccaatcaaaatgaaaacctttctctcacacgaggaagacaccttcaggctattcaggttttgtcctcccttttacccctgaggcccatgagtcacccagacttagattcgggctagttaccaagtttcatatcaaagctcacttctttctatccttgcttctagtgctttcacgcagctcctctcatttgaattaataaataatcattaatctactctctctaccttcgattgtgtcctcttttaatatggtttagctgtgtccccactcatatctcaacttgaattgtatctcccagaattcccacatgttgtgggagggaaccagggggaggtaatggaaacatgggggctggtctttcccatgctattctcatgatagtgaattaagtctcacaagatctgataggtttattgtgggtttctgcttttgcttcttcctcatttttctcttgccgccgccatgtaagaaatgcctttcacctcccaccatgattctgaggcctccccagccatgtgtaactctaagtccaattaaacctctttttcttcccagtctcaggtatgtctttattggcagggtgaaaacagactaaaatacacccttcaaacattgcttcacatagctgtcccagtgagcatcctataataaaaatcagatcatgtacacacacctctgcctcaataaagcctcatttcccacagaaaggcccagtgattatttagaatataagtccatcaaagcggaggccaccactgtatctccagcacttaccatgcctaacagggtaaatggtcagggtcatctactgatggattaattagtctgtaccctgcttagcaactcagcctcatttgttgccatattcccatccccccaaactgtacacgcccatccgctcagcaaatgaaattgtttcctgcatctatgcctttgccagcattgtcccctcagcatggaatgcccatccccaattaaccacttgcctattatttgaaaggttcgcaaacctcccctcttctctgaatccttgtcctgacccttttgcactggtagaactgatcactttctcctttatctcctaactgaaaccctaagcatatttctaacgtggcaaatccaacaccttatggtgtttacaggtatttttcactgtctccccactaaaatgcaaactgttagttaccaaggacacagttttacccatttcaatagcaactgtgcctccaacaatctttaattcacagaaatgattcttaagttttttgaatgaaggtaattaattgatgggcattttcctcattaaacattatagagtaaaaatggataaattttctattttgttatctcctccatagttgtgttaactcagaattctgagctaactcataggactgtaaggcatgtcaaaaattaatagtaacaacagtatcatgctgataataaaaatattagtagtagctaacaattattgagtatatatatatatatatatatgcgccccatattctgagaggtgcatgacatgctttatttcatttagtagtcccaacaaatccatgctgtagctactattgatatcccagttttatatgaagaattaatataggttcaaagaggccaaaatgcctagaatcacacaatgtacgactccctgaccactggcctttttcccttcccaaagggtggcaaactgctatagcatctcagtcttattaatgtaatagacacatagaacataagaaagaaattcatgaaaacagtgctgcaccatacatgcacttgtagtcctcactttttctagagtagtaattgcaagatgagacttatttcaagtatccttattaatagaagttaaatgtaaaaataacactattaccattattgtttacataggaaatttttgcctttttaacattagtttataattatttgacctgggactatacaatattttaaacttcttcagtgcatttttcaatagcgtttaagtttaaaatgcagtctttggcaggggcattaataaatgtttcaaatgtcattttgtataactctttaaagaatacaagagtttagaagaaatttctaacctttccaagttatctgaatttccaagttatcataggaagatccttcctttgtaacttttaaaacttttttgtatatggttgggcgtttctatgaatgatgcttttcaattttttttgcttcagtgaaaaattatatattgtgaaagctttcccacataaacaagcagtttttctatagcatgagtttcccatggctacaagatattgtatttttgaaatacacctcattttacccaataacttgaggttttttttgttttttttttttgtttttttttttttcagatggagtctcactctgtcacccaggctggagcacagtggtgcaatctcagctcactgcaacctcccacagccaggttcaggtgattctccttcctcagcctcccaagtagcagggattacaggtgcgcaccaccatgcacagctaatttttgtatttttagtgggggtttcctcatgttggccaggctggtctcagactgctgacctcaagtgatccgcccacctcggcctcctaaagtgctgggtttgcaggcgtgagcctctgtgcccggcctaacttgagttattgatcgagtaaatcaatgaatacagtaagcatgataagtacattgtttccaaattggagctataataagtaaaactgtaattttaaaaagatacttgtacataaaatagtatgcaagtaagagagagcccagatcaaagtaaccgaagcaaaacaaaacaaaacaaaaatctgttggctaataaaactgaaaaatctgggttaactactttaggaaggactgaccaaatgctcaaataatgtcaccacagcgtgtctctatcgtttggctcttgtttatattggctttactctgaagaaagctcaggcccacatgatggcaaagatggccgccaggagcctcagacttgtgtcctactgtgttagtttcctcctgctgctgtaacaaattatcacaaacatggtggcttgaacaatattactttattatcctacagtttgggagctcataagtctcactgcactaacacaaaggtgttggcagggctgtgttccttctataggctctaggggagactgagtgaaatcctgagcatccctggcttctagaggctgctgcgtgccttggctcatggccctcttccatcttcaaaactagaaatcgcagcactgtgacctctaccaccattgtctcatctcctgtcaccctcatggccctcctgagccttgatccttgagattacattgagatcccccacatattccagaataatcttcccatcttaagattcttggtgaatcccattttctaaatcacattttcaaggacatttgccacataaagtaacatattcacaggttctgaggataggtggtggacattcctatagactgaatgtttgcgtcctctcaaaatttgtatgttgaagtcctaatccccaaggtcatggtattaagtggtaggacctctgaaaggtgattaggtcatgagggtggagttctcatgagtgagattagtgcttttataaaagaggccccagagagctgccttgctctttccaccgtgtgagagcacagcaagaaggtaccatctatgaaccaggaaatggccctcaccagacactgagtctgctgctatcttgatcttagatttcccagccttaattgtcagaaataaatgttggttgttaaagccacccagtctatggcatttggagtataactgccccagtggatgagagagacatctttggaaagctacttctctccttaccatacctgccaaattaacaactccagcagaagaaacaggcttcttttgtgatatttccagaaaatatcctggactgactttgcttagactgatttcttcagatttgggaaacaggcagaggtggttcctcaaggcaaagccaagatgctactagaagaggaatgaataaggatacgtaaaaataacagatgaccccaatgctattaatttatttcaaactcctttttgccatcagaaagcagtaataagctcacatatcaattccaataaaataattttttaaatcgcccaaacttacatttcaacatagcaagcaaaaagcaatgaataaaattgcttcaccaaaatatagaagctctgttgaccagaaattcagcatagacagttgttcaagataatttcaatgtgttcagcagataaagggacaaataaggactctttaagggcaaatttagctgagggatgtgttaaattgtatatttggcagactgaaactaaagaataaaaaaagagacagcttgatataactttctatgccaaacccaatgttatactctaaatctaaaactccagaaaaagtttgaaagcaacaaatatgaagtcaggaaaatcattctaaattaccaactatttaggtataatcttgagcattttagctgtagatgaaagtcctatttattcatatagattctcatatgctatgaataatagttcatttggatgtctctttaaatcaaggagggataaagacaggaaggaagaaagctggcaggcaataagagccaaagtaaagatattattttgattaaaatatactcattgttgaggtatccacaaatatttgagaacacattgaagaagtaagacaggtcagaaaatataagtatatgatcagcacttagtgaaaacagttaaagagaaagaaagagcaaaagaaaaattgcttaaagcaacatagatattcaaagataaggaattaaagctgagataaatgtgacagaaatggaaaggaaggaaaatgaagttatgaaacattggcaaaaatagctaaagaatgcagaataaaatgtcctagaaaacatttatcaaagggttatattttattagcattcagtagtcacaaggcaagaaatatgatagctataaataaatacatgagaatgtttaaggttttatgatgatcgtggctttactgttcaatatatattaaataaaccacaagttatctataacacagttctgaataaaatttaggaaacgtagagtcaggtacctcaatatagaaaaatacagaaataattaaccataatgcagacaaagtgacacccagttgtagagagcattacaagcattgaaatattcagaatattatttgattaaaaaaaagctcatgtaaagataccctaagcaataccaaagatacacacacacaaacacacacacacacacacacacacgacacatacatgctatatataggaaggaagaaagcttctttattggggacacagtttacatattacctcttgtttctatgagatgctataagaaaaaatctcttaagatttactacatgggtaatatatttatatagtgtctgtgtgtatgtatagcaaactcttatatatatatatggatatcttacagtcttatagacttatatgagagtgacagtaaaagagagagagagagaggagtgtatacctatttcctctcaaaaaggccatattctggcaactcccttattccccattccctactatgcagtttgatctagccttagatttcccaggaggttctcttccagaaaagtgcctgtagctataaaataatcttcatcttggctgtttcaatgcaggattcctattgagccaataccttaccattttctttccttcgtggaactgtgctttgtcataatgcaataagttttctatgaagtatatcataaacaacagtcctacagaattcatcattggacataatatagcttctttattggggacacagtttacatattacctcatgttctatgagatgctataagaaaaatttctcttaagatttcctacatggataatttgtacctacacttgtagtttgtttttatcatatggatgaggtaattatcacaggactgattgttttccttctttacattgactgctaataagttcagagccaatgttagcttaactccaactatagaggctgattgcatatattttaattccaaatctaattcaaggtttatgttcctgcccttatttttttcttcttgatttttgtatttctttgctgttgtttttgtagatttttctgtgccttatacttttttcaaagataattaaaacagtgtgtgaattcagtggggtggatgaatgaatgaggcagagaaaaaggaaattgacatggtaggataacaaactcacataatatgtagatacatataaaaagacacacaaagaaaaaaatttctctaatatatctaatcttctttatgaatgatcccatctaccaaatagtcaagaaacttaaattttgtaaattgcaattaacaatgtctcattttattcaggtttaaagagttcctttcactttaaatattcagttcatttaagttcaattccatgttagggctgatgtaaattctttcttagatgactcagtctctttaggtgatatgtttggaattcaaccaccttacccttttctttccgtgatgaaatttaggtgataaggtgagacagttgagtgtcacctgaggcaaaaaaaaaaaaaaaaaaaaaaataggcttaaatccatgcattgccttctggatcttttggtctgagcagctgagcagccaatctactctgttccctgtgtaggtacctagttatatatggattttcctacctggacttttgggattatgtgttgacaccactgctgaagccaattgtttcagccgcttgactccatctcaaagaccctcatcatgggcacttctttgtacttagcccaggactttgccaggccactagctctctcaattctctgcatctacttcctggacccctggggacttctgtattccctgcacctgtaaacagaccatggggattctagaaagtagcctctgactcatgtagccaagccttgatttttctccagcgccatcttcccacgacttaagtaagacttcccccagagacatgcagcctgcccctagaacactgtgagaggtgctctactacccagtactcttgtgctgttcccatacttatctaaatgcttctagcctttcctaacccaatcagtgtccgcccatagcagaccaggggaaagaccagagtcctgacacctaagttccttgttctgcctccatttttctttaccctctaggacccaaaaaactgacctccctctctgtcctgcacctttctgtcaaactgatgtaaaactctatgatcaagtccagctggtcttacatataatatggtaaagaatacaataaataattaagaaaaagtgttacacctgaaaaaaaccttacttttaaggcagttctcttgttaagtaatcaaagatccaaatttagatgtcagagctgaatattaatgctttctatttccattcctctcagaataatctaatctctccccactcaagacagatagattcctcagaagaatatagataaggttatgtatctgaaaatataaaggagaaaagaatattaatacatttcaaaaatataatctcaattacaagtagagggaggaaatattttatatcaccaagggcactcattggaaaatcaccatagatattttcaaagaaaataaaagacttccaaaatcaaaagaaattaagaaaatgaagaaaagacaagccacagactgggagaaaatatttgcaaaatgcatatgtattttttaagtggtatccaaaatgtgcaaagtactcttaaaactcaacaataagccaggcatggtggctcacgcctgtaatcctagcactttggtaggccaaggtaggcaaatcacctgagatcaggagtttgagaccagcctggccaacatggcgaaaccctgtctgtactaaaaatagaaaaattatccaggcatggtggcgggagcctgtaatcccagctacttgggaggctgaggcaggagaatcacttgaacctgggaggtggaggttgcagtgagccgagattgagccattgcactccagcctaggcaacagagcaagactccgtctcaaaaaataaataaataaaataaaataaaacaataagaacatttaaaacccaatgaaaaaaatgggcaaatatctgaacagacacctcagatctgaactatctgaactatctgaacagactataaacaaagtatatagatggtaaagaagcacatgaaaagatgcttaacatcaaatattactagggacttgcacattaaaacagtgaaatatcactacctgcctatcagaatgactaaaatccaaaacactgaaaccatcaaattttgtgagaatatggagcaacaggaacccttattcattgctggtaggaatgccactttggaagatagtttggcagttactcataaaactaaacattctcttaccatatgattcagcaatcatgctccttagttttaactcaagtgagttgaaaacttctgtccccataaaaatctgcatgaaaatgtttgaagtacctttatttataattgctaaatcttgaaatcaaccaagatgtccttcaacaggtgaatctatcgacaaagtatggtacatccatacaatgaaatattattcaatgataaaaagacatgaccaggccgggcgcagtggctcatgtctgtaatcccagcacttcaggaggccgaggcaggcagatcacctgcagtcaggagttcgagatcaccctgggcaatacggtgaaactctgtctctaccaaaaatacaaaattagctgggtgtggtggcacatgcctgtaatcctagctactcaggaggctgaggcaggagaatcgcttgaacgaggatgtggtgagccgagatcatgccattgcactccagcctgggcaacaagagtaaatctccatctcaccaaaaaaaaaaaaaaagacatgaccacaaaaagacgtggaggaactgtaactgtatattgctaagtgaaagaaaccaatctgaaaagactatatactgtatcattccaactatataacattctgaacaaaaacaaaactatggggagtgtacactgatcaaagtctaatgtaaattatgggctttagttaataacaatatattaatattggcttatcaattgtaacacaagtatgacattaatgtaagatgtcaataataggggaaatggggaggatgagggttgagggggtgtataagagctctgtatttccactcagtagtaatacatcccatgctagtcttaatcttaaaaagggaaatatattctagttgctgtatttcacaatgctatgatcattccttgtcttacttagttcattaaagctgccatatacaatcatagactaggtagcttacgaattacagaaatttattctcagagtctggaggctgggaagccccaggtgaagacaccaatggatttggtatctggtaaaggcccatttcctggctcataggtgacattttctcatcatgtcctcacatagcggaaggacaaggcagctctctggagcctcatttataaaggcaccaatctcattcatgagggctttgccctcatgacatagtcaccgcccaatggcaccacctcctaatatcatcactttggcaattaggtttcaacatatgaattccaagggggaagacaaacattaagattgcagcagtcctttcttctctatcaaatccttgcttatccatctagatcctcagcaaatacaacttagactatatagcccataatgatctactttgctaatcaactcacatacaacttcttgactctgccatatgggggactttttaaaacattgacttatatttctacttaatcgtgtacaggtttatatgtgtcaatattcagaactatgatttacacacatagaaacatataaattaaaccaccatcatcactcccaatcatacacacacatgttcatatacagcatccaataaagcatcctattcaaatttggtaataaataaatatttacttcttgaaagatcaactggctaaagaaaataatgtattccgattcatccactttcccaaaggagggttctacacaacaatcactagtgtgtgcctttggtcacacttttaagtaacagtaagcaatgaaaaaacaaatagaaaatgccaggctgctctcatttgcactcctgcttcatgtaaatgctttcaattattcatctagcaaaccacacacacattgcaaatgcctaaaatttccttttgccaattagaggtaaacgcagtccccaatttctatccatagaagaattaaagcaattctatttgcatccaatgtaaccaaaagttgcctttctcaaaagatacctatgtggcctcaataatccagacaaaaggctcactctctcagtgtggctgctgtacttcttgcctcttgtctgtataatctactgaaattaggtaccacagcactttctctccaacaaatccatggaaagtaggaaaacatgttgaactactccaggactcccaaattcaggttgaaattttctttcaacatagaagtagaaacttctggtgaaagatggtaatagctcagcaggaagtcagcacaaacctctaaaggcaaagcaggaggccggagtcctcccctctctccctccctcataaggagccctgctctggagacttccatggggacaagagagaagaaatcgttttgctgctcagatcctaggattgagtgacataggaatggagggcccaaaaatttgagtaaaattcctagacttggtttctgaaactatcctgactctaagattaagcaacttctcttcttaaatttcttcttataaatctctccttggggaacgttcctgggtggataaaacctatggaagaggggaaacagagttgtggagattaaagttaaaataaaaaaaagtctttttgttttgttttgtttaatcctattttctcattatttatctgaggtaatcaagatccagagaagtccctcccttgccctacatgggatagcagggggttccgcaaggattctgtcctcgcactgactcccactcccagtctgtgtctgcttttcataccaaacactaaatatgttattaaacaggagaataaaagttgtgaatatcaccctggcctagacagaaacacacaatatatacaataccatactataacagatattctactagatatgagagagccaatacaggctaatgaagaaacaagaggaaaagatgaaaaaaatgacatctagaggtattcgtaaaataaaaatctaataggtaagtaggcatgagttaatctgatctttcctctaccccaaattatttttctgccccaccgtctaggctagaatgtctacttcctgcttctgtgcctatagtcatcttagtctttgtctaagaacttggtcaaaccagaacctttaggtattgtgactccatcagttaatccctatggatattttgcttcttagtaacattctgggataacatttgtagactgctttggttattaacaaaaccaacaacatggagctttaatgcactctctaacttgagttctttgtcttgtctcttttacagctgcgttttctctgtgacaccaggaatcagcatttccattcaaatacagcaaactttaaaccgctttttgacaggaggaaacactttctgcctaatgaaggggatgaagcaggtaacccagagagtatctgccacacaggcctcctctacagtagctcagaattgcactgtttgattatttcttacacgtggcatctgcaaattcagaaaggtgagtgatgtcagatctaaaggtcccttcttccatcttggttcattcaaattcaggtctaagaggaaacattgaagaagctatctgaatttcaacaggactgattactttccaccaaaggctgtaggagacacagatttaaagagtgactagggggttaaacataaacatatattgacagtaattcctgcattgtcatcaaagtgtgctcatgtttgtaggccaactcttagtggtattcagacattggaaaactgtaaaaccttcatgcatttttaagatgacttctaaaatattttattattagtttaaatgtttaaatagctacaaaggttgtaaattccactgtaatataaacattgacattttcaaataaaactcagaatagcttttaaacatatccagtgaaaccttaataccaaagtgatttgatacccatcaacacccagttaaaattcacaacaagctcttcattgacaattgaagaccttatattgctcttttctttccttggaatcatatttccattcaacttctcctgcagaacttaattttagtatatttttgtttaaaggcttttgttgatcacccaaaatgcctgcaacaaaatcacgtaaaaaattgaaattgcttttaaattttctctgaccatactgctctaattgctaaaaattatctttctagattgagttataaatataattattgttgatgtaccttttattaaaacaacaaaaatatatttcaattttagttttaaacttacaggcgaaaattttttggaaatgcatttcttaagaaaatcactggggtcggcccggcgcagtggctcatgcctgtaatcccagcactttgggaggccaaggcgggtggatcacgaggtcgggcgattgagaccatcctggctaacacggtgaaaccccgtctctactaaaaatacaaaaaattagtcgagcgtggttgcacgcgcctgtattcccagctactcgggaagctgaggcaggagaacggcgtgaacctgggaggcggagcttgcagtgagccatgatcgcgccactgcactctggcctgggcgacagagcgagacactgtctcaaaaaaaaaaaaaaaaaaaaaaaaaagaaagtgactggggtcatatttatggttaattaaaggaggcttccttgacaccaataaattgtccctttgtttaatgttccaggggtgtttaaactgcagggcaatgctgcaaaaggagattccgtcttgaataaggttggggaagagcaattatgaaatttgagacgggaaacaagaaccacagtcaagctcttgaacagatcacttttaggaaaggttacatacagaagttgaagatctggaaattgattcccttaaaatacataactgttgcctagtttgaaaaatcactgcattagattgctctccacattactgatttcattctcagccagacttcatgaagtggtgaggtttgaggaaaatcagcaagagattttaatgacagagccttgagtttcagtaaacctgataaatttcctaaaacttatttgacatttctggcttgaaagaatagctcctgatgaattagaaaattatgggagattgagttcttgcatgacacaaagtcatttaaacatatatctttatcttgggaaagacagtttaaatgtcatggccatttattaataatattgtgaaaaaaagttatcccaatcctggaaaaaagaaaaatgatggttgctagtctttttttttctctatctgcaagagcattttcaagtaagcaattatctggcattcttggggatcgtaactttgttgtcagagcatatttacctagcaatccataactgagaaaaggctcacatagtttacattcctgtgggttggaggttaacccacagaaatggaagagttttgcgttcatagcctggaaaaaaaaattaaccccagattatcgtgtcaaccctaatagcattttattttgctatctatatagttgtatctttttcctgtaaacatttgtggaattagctttttttagttaatgattaagaatagtaacaaaatgtgaacccaggctcactccctatttgtattagtattttgttttttagcacatttaaggccatcctggcactaaatcagaaaactacttcctgatacctaaactataaaatcctggtttcatatacatctgaattaggcaaaaacatagctggctattatttatttaatttgatgtcttaacatgtaaagattttcttttcagaagaaatctaatggaccagatgtcctgaaacactcttaattatttttcagtagtacgaacatagccatgaaggcaaaggaaggtagatgatcaattcatgttaagagtttcaaattccatggactaatttatatctttctccacagccacctggcacattctgcctttgaacagatgctttacaaaaacataatctgtggacatggagatcttgcataaagcaaattctctctgatccacagcttcactgaggggtttcagttttctaggccagagtgactgctggagatgaagagattctatcaaacgtcagtgtaaaattgtctcttacttaaaatgccctcattgatcttatcctgatacccttactacagaagtttatcatgactcatctaggagataccagagagttcactagccaattcaagagcatgacttctcaaaattctccatgttttcctctttccttcctagctaatcccactttctcctgcctttgaaggctatagcttctctgccaatttcttgaattatggggttcctaagccctcttctatgttatccacagattctaggcaatcttactggctcctgagcctcgaataccatttaactgctctagactgacaaacctgtatctctagccaagactctccttggcacagacacactattgggctccctatctcatcaccccataggtccaccttctctgtgtccccatcctagtaaacgaagccatcagtgcctccaacatgttctcttcagtctagccagagttattatttaaaaatacaagtgcaatctgtttgctctcttgcttaaaactaatcagtgacttccagtttcccaaaggatggaatcccaaatcattactaaggctcacaaagcctttctttctctagcttattcctctggtttcatctttcatctttattcttcacccatcttgcactctgtgcttaatatctcctgtttgcttccaggtcctctctccatccttccacaccctgctttgtgccccaggtgactgacctatagggattataccaataagctatcttgtcttttggtttccagtaggtttttgcccaagggcagtacccacagagaacagaaaaaacgaggaaagtaaggtcaggctatatattcccccaacttcctcccttcccacatactgacattaacccacaatcagctccttacggtggcctctccaaatagcctgtctttctccaggttttggtaatcactccctcctttccattcaaggcctggagtgatgctagtcccaggttgtagcactatctcttatatgttccctgctcactgcttgtatttttataactagtgtcatgtttctcaaattacacaatttcagtatgccataagtttcctaccagaacccagattgatactgtctgctttcaaatcctaaaaggtgtcaactatggcttaaatgttccttatttcgggaggccttttctagccgtcttgacttggatgtaaccgcctgctaaacctcctacagcaccctgtccatctcctgacagaacatccttcacacttagcagcaatcattgaatgagtattagtgtcgccttctctaaacaacaaacaaactgtgtcagaaaaatataaagcaaaatttgtaggaaatataaaaataacttgataacatattcattatgggacaccttaatatctttttctcagagagagaaagagagagaggatgatggaaaaaactttatattaaacatatagctacagaatatttacaaaaaaatgagcatataatatgactcaaaaaatgggaatcatataagccacattgtctgaacctaatgcaataaagctagaaactaataattaaaagatagcaaataaatgagtagaaagagaaccacttataatattctaaaacattttcaggtcaaagaactaagagttaaaattacacgtcactaaaaatgaaccctaataatggtactacataaaaaaactatatatttgttcaaagcaatattcacaagaaaatgcatccatctattaataaaaagtaaaacaaaggaggcaaatctggcaattcaagaaataaaaaagaaatgagcaaaataagccaaaacagagaaggggaaagtttaatgataaaagcaggaattaatttaaatgcaaagcaataattagaatgtacaaataaaggcaatatttctaggaaaactgataataaaaaagaaaacacaaatgtgcaatgttaagaacgcgaaaggtgctataaccccacaaaaaaaagcaatttttcaaatcactggttaatgccttgtatacatagatcttgatgaaattggtggtgtttagaaatatataactttttaatttaaacttctctactttctaaaaatttatactattttacaattccaaagtcaatatcaaattgtaaagaaaaaaatcctgaattctgcctcttcttccttcttcacatacgcagcaaataaatgctacacatataccaactactatgtctcgactctcctatgttttcatcattaaagaaaaaaacattgcattcctactatatgccaatcattgcactacacactgggaaatcaaaaatgactatgagaaattccctgctttcaaggagttcatagtctagtgcgagaaacagacagatgtgcacactgattataatactatgtggtacctgtgataatgcataataatgatagatgtctttactgagtttctgctaagtgtcaaacaccttccattcagctgagatcttgtcctttcctccaactcttacccgggcattttcacataatagctcgttatcatctcaatttcaaaacactttttgtactcagatgcttctccaatttcccagtttctgtaaatggcaccacaacatttccttattcaggcttgaaccttttgagtttatagtcaggtaccaatgcttgtcagtttttcctttgaagtgctattgaatgtatattttgtttagaattcccatgactaccaccttattcaagtccttagattgttcccaccaagttgaaaggggtgtcctccttcctcttcattattgaagtctctttcttgctcttctcccctatcctaccagctcccaaccaccctctgaccctctgcaccactgccacacctttctttttaagatatcttttcatcatatccctccactattcacaatcttacaacagtttctattttctcatgaatataagccctttgaagtagctttcagtgacttccattatctcctcctcatttcaccaatttatcctcattcccagacactattacccagactctgttttctctgttagctggaccattcttcacactttctcaaagacatgtcatcctcactcctacctctctatatttcctgaaatagcctttagtgcgtgctctctctctctctatctaaacattatgtgttttttaggccttagctcctccaaagagattgtactaaattcctatagcctttcataatttccctctcttttgacctcacgtacagcatacacaaaaaaaatgcacccaatgctatgctactgtacaaagcagtgtactgctttgcactgttaactttaactctatgtgcattattttaatctttctaactatcttacaactccattaaaaccaagactagatactgtggaattatttaatacccccacccacctcatcatttatcacattacttgatacttggtgagtacttgctgggtacatttgaatgtaatgtcttttatttcttaatgtctttcattttctcaagtgttgttaaaggcaaaaagcaatgttggatggttttatcagttatgcagagttcatgcaggaaaagagatttcagtgggaccttgcttaagacaatagagaatttagtttaggatttaacaggtctagaaattaatgtagaaagctgtcccacaaagatctattatccagaatatgtaaggaacctaaacaattgaacaagcaaaaaacaaataactccatttaaaaatgggcaaaagacctgaacagacatttctcaaaagaatacacgcaagcggccaaccaacatatgaaaaaatgctccacatcactaatcaacagagaactgcaaatcaaaaccacgatgagatatcatctcacaccagtcagaatggctattattaaaaagtcaaaaaacaacagatgctttcaaggctgtggaaagaagggaaaacttacacactgttgatgggaaggtaaattagttcagccactgtgaaaagtagtttggagatctcgcaaagaacttaaaacacaactactattcaacccagcaatcccattatggggtagatatccaaaagaaatcaaatagttctacccccaaaagacacatatactcccatgtttattgcagcactatctacaatagcaaagaaatggaatcaacttaggtgcccagcgatggtgaattggattttaaaaatgtggtacatgtacaccatgtcatactatgtagtcataaaaaagaacaaaaccatgtcctttgcagcagagtgaatgcagctggaggccattatcctaagcaaattaatgcagggacagaaaaacaaataccctgtgttctcacttagaagtgggagctaaatattgggtaaacatggtcataaacatggcaacaatagaaactgggactactagaggaagaaggaagggagtggagcaagggctgagaaactaactttcaggcgctatggtcgctgtattagtcccttttcatgctgctgataaaaacatgccaagactgggtaatttataaagaaaaagaggtttagtagactaacagttccaagtggctgggaaggcttcacaatcatggcagaaggcaaaagacacatcttaaatggtggcaggcaagagagaaatgagagccaagggaaagtggaagcctcttataaaaccatcaaatctcataagacttattcactaccaggagaacagtatgggggaagctgcccctatgattcaattatctcttactgggtctctcccacaacacatgggaattataggagctacaattcaagatatttgggtggggacacagccaaaccatatcactcactatctgggtgatgggatcatttgtgccccaactgtcagcatcatgcaatatacccagataacaaacctgcacttttttaccccctgaatctaaaataaaagttgaagggaaaaaaagaaagctgttccacattgattgcagtgagtataatgggcaaaaattactgcccccaacccgcagcccccaaatcctaacagaaatctgttacatacacacagacaagcatggattgagcattagctcagtagacaggtcggttgaatcccactttccagctgcatgatcataaacttattgtttaacctctgtaagcctgtttattcttctgtaaaatatagatcttgtgagaattaaatgagattatgcattcacttagcatagtgcctggcatacagtacagctcaatacatgttagttattattatcatcttttgtcctttcttccacaactttgtataagaagtgttggaggaactgaagaaaatgtgatgtgttcaacatggtacagaaaaggtacaccatgggcagatggtcaaggtgagtcatagactaacccagttcacaggagtagctactcatgttagaggagtcctaaagaaataaaagccttccttccctcccactctccctccatcaatggtccacagagttgagagaacacaactgtggtaggcatctaccattttgttcacttagaatggcaactcattcctggtaaaatataaattctaaccatgtgttatgaatggagactgctatcttacttatgaatgggctgatgaatccacccagaggtggatgcctgacccagctgaaccaatcatgttatgtatacaccactctagtcacaaattgcccccctggatgggaacctggctcagactgaagcaatcaaagacttacctcaatatttttaaatctgggatcagaaaggatcctcagtacttctttggtggctacactgtgagatgaatcccaaccaaaaaatgtttacaatcatgcctcctgctttgtggtggaatctggtctgaggaatgaaactaagacacgaatgaaaggaaaagtcttaaaggattaagttccctggcaccctggatgcctgaagtccagatacacttctgctcttgccaaggttattggagtcagtgcatttctcttcttgcctaagcacatttgagttacatttctgtcacttgtaacatcaatgagacgttaaagagttaattcactaggaaatttttaggaacaccttgctggcttacaagaagcatcaattctacgaattactttctcaggaatttctctaaatatcctgaagagggcactgtttccattcataacttctgtccaaacccacccccattcttttgtttttttttaatttttctttttatttcttttttttctttttttttttatgaaagggagggactgagtaaattgcaggatgtgattctaattggttggaacatcttttgaaatcgtgtttctgtagagaaagaaaaactaccatatttggatagccctggccaactttcaaggctcctaaatctgagttttcagtgaactggacagaaaaaaaaaatgaagaagctactagcaatgattctgtggcttcaactagaccgtgagctgggggttcattgaaaagggagccatgggaggaaaggaattgtccatacaatgtttgggggtagagacaaggttcaatgcgactcatttgggttccctcgggaggaacaggattattggggtaaccagtgaatgcctccttctgaaatgttctctttggacagggttaagtggagagctgaaagtggaacaaaaccctctgttcctgagcatgcaggagggaaaaaactataccatctactgcaattattcaaccacttcagacagactgtattggtacaggcaggatcctgggaaaagtctggaatctctgtttgtgttgctatcaaatggagcagtgaagcaggagggacgattaatggcctcacttgataccaaagcccgtctcagcaccctccacatcacagctgccgtgcatgacctctctgccacctacttctgtgccgtggacacacagtgctcccctgacgccaccagtctgtacccaaacctgcagctggtgggcccactcctcctgcaggaactatgactgtgaggcttcgttcactgtctgtacatttctttctgcaaggaaaattctgagatgggtgaaaaaagatgctgttttaccttcttaactgtggaatattttttaaaaggaaaatgtgttcaggctgagggaagattcctaaccatgtatttcctgagaatatgaggtctcattctttactgcctcacagtcagaatttgttagtcttccattatggaataattttacatgtagtgcaactgtcacaaataattcctatgaaatatggaatcattatttgttttatatgtgaatgtaacatatggcatttaccaatgaaagaaagaataaatgctttataaaagaatggtctatgtgaggttccttacctagtgtttcctgctaaaatattgactacagtagtcagataatatccgtgtgatctaagtacctgtttatctcaatgtgtggagagtctctgggaaatgtatcctttggctggatttactccaaaactatctgagggtccttgccaaccagaagaatattatattttttcttgtattatttgccagtttcctcttctcctccctccattttttttttgtaattgttttgctacatggtagaatttatattaaactttatttgcccattgcagactagataaaatgaatttcactttcaggaaaattgtcttataagaaatccccaatttgaatgttatacaaaaataattgaaaataagttttcctgtcccactaatgagataatcagtaccttcagatatcaattgcatcatattttcatcccagacttctaggaaaataataaacttgattcagtcaggcttttaagtgacaatatttcagaaattaccattacaatgtaaaagctgaccttaacatttcaacatttgtaccttcctaagcaacagcacctttaaaaacatttaaaaactaaaaacacttatttctctaaattgcccctagagtctttacaagcgaatcagcttctgcagcaatttgttggcagattatgaaaagtcagccacagcagtgtacagaccaaaagctcctgctaccactcagagcctccagcagggactataataacttccgtatttagataaaataaaatttgacatgaaaaaccgactagttccatcatcctttgagtcaagcagaggtttcactctgacagagtaggctgaaaaaactttgaccttgtatttataaatactcacaacgtatcttaaatttcaagtttcttgatctgttaccaaagcaagtttccttgtcaatgactgattgtcgggaaatttttattttgcattgatgatcttatttgttgtgttgttacataatcagaaaacaggatgttacatcagattttctataacctttctggagcatttaacagcatgtcttcacacactcatttccatgctgaaaacattttcaccaggaaactattcatgacggggaaaaaaatattgttcaatccaatctaattaactgaaggaacaatattgacttaagtccccaaatctcttccttcttagagagaactcttggattctgaagatgaacttttatatcttcttcagatcaagaatataaacaaaccctaaaacaaatgaatagaactgaggatttcattaatttgatctttagaacataaaaaactaagttctttccacttctccttcccaattttcctgactccttcccaacttatgagtatatagattttttgctttcttttcctagaatcacttactgtcactgaaaatatatcattaaaccttattctcgaagaaacaatacagacattcaaaattgaaccagttgactttaagggtgtgatggtgtagtaagaaaatactatcgaaggtgacaatctccaatacattagagcatgctaagccaaatatgttttcccccagtaggacctttaggaatgtctcaggtgactccaagcttccggcacttgctgtccatgaccagagcttctactaacaagaagttccataaaatacttggatccatcctaatcagatacaccagttgccaagtccacttaccacagagattaggaaaggagacatttttctcagttgtgctattcatgtcccagaaatggcatttaagacaaataattctttgagtatttcttccaccctgtctcatctgttttggtgtgaactagtctcttttttcattgcttttaacacagctggttattttttcttttaatagtgtgtctgcttcaaggtttatctagaagttgtttcttaatatcaaaaaagttaacattttttatttttactgaattatgatcagagaatgcacctgtatgagctgtactttttaaaaactttcattaagatttacttgaaggccaagtacataatcataataattttattggaaagctatgaatttatatatatgtgtgtatctatgtattcaacttttttgatcatatcattaaatcttcctatgtccttgtttccattttctaaaatctgtcacattctgaaaaagactatcgaaatctttcacttattttgtcaagttcttgcaaattgcttttgctttatctagctgcaatgttttcggtgtatatggtttatgacttacgtctcttcagagagtctttttagcattaataatgtccaagaaattatccatctcttctagattttcatcattatataaagtccttcatcctgtgtggtgcagcctgatattttttcctcaatatccattctactgtcttccccttttttactctgccccagaataaaatctgtgttgcccagacctccttacagctaagtattggcatgaactaaattctggtcaatgaaatctaagtgtaaatatgaggtgcaccttctaggaatttatctaagactcagtatgcatgttcttccatctctcccagctacctggcctcccatcccctttcctgctggatttgttgatcctcggagactcaagtacatccttcacttagtctatgcactatataccttcttcaatgaggtccctgtgtcagggacatggttctcagtttccagctactttccatgagctccctcaagcaagcaaatatttttagaaggtatttttagaagacaacattttaaaagaccatagtgtcctttctactctactgtgtctgcaatatgttgcagtagaacatttcacaaagctagatcttctcagagctccagatgggaaccaggcaaaaagctctctttgcagcggacagtcaacctatcttgtggtttccattgtccgcattcctagctcagggttttagataggatttgtgattttttaaaactgccctgaaacctcaggctctgctcttgacatataaattatcaaaaagaaaaattaccaagtacctgtctcttgcaactcaaaaaaatgccttatttcaggatattttttcctcctaagactttttaagtccattttgaatacaaaatcaataatttgaccctttgatctcactggatcctttcacaatctccctttactggagcaataagattcatcctcaaaatttgtggcaagagatttacaggggaaaaaatgaattttaaagaaggaaattatcatatttgaaactgttagtccactccatttagactcagagattctaataacacaacagtgtgaacaccagatttggttatcagaaagaattcctgagtattcaaactcttctactgtgagctctatgcccttaggcaagtttcataatgtatttaagcctcacttttctcatcaaaaaaatatggaaaaaataataaccactttctaaagtttttatgacatttaaaatgagatggtgtatatgtaaagtaaacagcacacacaccagatcttctagaacagtgtttactagagaaaattcataaagacaagagaaagagcaggtgtgtggtttccccagaggcagcactcaccctacattctgaaacagcacacagcaacctagcatggccaatgtgagaccctaagaaagagaacccagtcttgagccatggaactttaaggctgcactggggaagcaccaggccttactgtagcatgggggctgggctccaaattatgtgattatagcaaaatcaaggaaatctgcaacctccagtcctgatctgccacctcagctctcttacaaaatttattgcctcaagtgctaggctggggctctattagaaccagttccttctctggaaggccaccctgcagggaatccattacccttacctctcagtatgtgaaattcactagcacagagcctggcatgtagttggtataaatgtggaatgaatgtgtgcagccatggaggacaatgtcttcagtccctttgtaatgcagaaagtgtgcttgttctcagatcaaataattaacttattgaacaagtgtttataggtatctactaggtaccaggctgtcttctagacacttgaactatcttcttttaaaaaatgcacgaagatatcagattttatagaaaatacattctagtaagcattaaccataagtaaattactatatggtttatgacttcagagagtctctttagcgttaatatattttgcattacaatatatgagaagataagtcggacgggcgcggtagttcacgcctgtcatcccagcactttgggaggccaaggcgggtggatcacaaggtcaggagatcgagaccatcatggctaacacggtgaaaccctgtctctactaaaaatatatatatatatatataaaattagccgggcgcggtggtgggcgcctatagtcccagctactcgggaggctaaggcaggagaatggtgtgaacccgggaggcggaggttgcagtgagccaagatcgtgccaccacactccagcttgggtgacagagagagactccgtctcaaaaaaaaaaaaaagaagataagtctatggagacaagaatcagagcaagttaggggatagggaattctggagggggccacagaagggtggttcccttgtaattttaggtaaagtgtcagagtagcctcactggaaggataacatttgagcaaaattgaagaagatgagagagtgaatcttgcatatacttggagcaagttttccaagtagaggagagtccggtcctaaattaggaaatgcctacatgttctagaactaggtggaatgagaagccataggaaggctttgagaaaggagtgataaaatctgacttccatgtaaaagtcttactctggctgccgtgctgagaatagactgcagatcatcaagatgaaagtggggaaaattgttgtattaacattaaaaccaaagatatctggtgttactctgagctcagaggcttcttccaccagaaaagctcattcaagagcagctgttgttactgctcctgctgatggaagaggggctaaagacatatttgatagcctttctgtagatctcttgactgcagatgacctgtgagtttaggggaaaatgacaggaaggagtcttaatttcagacacaagaaggtctgttgtgaaggcatcttccagaaggcaatatttgtgctttcttctgttgtgtaagactccctactcaaatttaggcagtttaaggaccttagaaaattgtgctgtggtgataaaggtaatggaagtcagagcagagggataataaaaatccatatgcctctttgaaagcctgtgtaataaagatatctgctgcctcaccgatctgaacagggttgaataagcaacaaatggacaagaatgctcagtccctgagctaccaggagacataggcctttagtgggactgcctatataatttacgggacccagtacaaaatgaaaatgcataacttcctaagaatttgaagactgcaacagcagagcattaaagcatgagttctatgagactgtacaggtttcatacccaggaagctggccctgatcactactagtttggaatgccatcattattcagatatcgatgttacaggcaggagcatgggaaagaccttaaattaatttgataacaattcaacctagtggcatacagaatgagggcaaactaactgagtagtttggtgtagaaaagaagcacctcacctcctcaaattacctctgagatggtgagatgccctgtccttttgacatctacatatttaatataaactcttcacctaggaccacagcagtggcagagatccagatgctcggagagatctatttgcacaagaaaaaatatgcataaagaggttaatagtcaaaccaaataaggggctgagttgtaccgtgagcttttttacaacttcaaagtgggaaacatttattgcccttactcatggtgctgtctaaagaataactttttactctcctgaacatttcagggttctactcttattagagaaattgtactattatcattttatttttaaaatatttttagaaatgggggtctcactgtgttggtcaaactcttgagctccagccatcctcctgcctcagcctccaggggagctgggactccaggtacgcaccaccccacccggccactgagtcactattaaaaatcatttagcatagccaggcctggtgtggtggctcacgcctgtaatcccagcactttgggaggctgaggtgggtggatcacctgaggtcaggagttcaagaccagcctgaccaatatggtgaaaccccgtctctacttaaaaaaaaaaaaattagcctggcatggtggcacccgcctgaaatcccagctactcaggaggctagggcaggagaatcacttgaacccaggaggcggaggttgcagtgagccaagatcacaccactgcactctagcctgggtgacagagtgagactccatctcagaaaaaaaaaaaaaaatcatttagcatacccagtctggggctttctactgagagcctttgttgacttctcttctaaggcaaagagcagggatataaagaagtaacacttcgaaagatggatgttctagttacatttctaggctctgaaatcaaatacttaatccacatattgactgattaatttatccaacaaatattaaacttgaccgacccttatagtgtctggagcctagtaaataactattgaataagctgtgaacagacagccaagtcctgcggactcagagaataatgagacaaatcagatattgaatcctggcttcaccacttttgagcagtgtgacctggagcaatttgtttatcctctctgatcatcaatttcctcatctataaaatgggaacaataatattaacacctattttcacaatcatgtggattaatgtatgcagagcctctggttcatcactaagcactcagtaaatattagctatcatcatcatcattactaatttctattgatttaactagacacagaaagggcagcatgtgtcttacaagccagcgcttccctcttctaaccactaattcaaaaaggattgtaagtaatgtttagaggtcactccctagcccaaaataggatgccactgtgttgtgctttgttttctttcttcctccagtgctgaagcacttgtgtgttttggttaatctaagatttaaaagattcctacatgtagtcatgcaaagtacttgtatatacctctaaggacctagcaggtctagtgatcctggagtctcatatccgaaagaggaaccagtactaaaagacaaacttcccaaaatctaaagaagggaagtgcaatcaatggtatgagttagaagcctcaatcctgggagagacagcctgtgcaagccaggagaaatcatgggttctccagtccccagcactggagcagccatgatcagtgcctccacttcaatgcttgtgaggctgttactctctggtgagcaaaatgacagtttaaaattttggctcttttataatttctcttatttctcattttgttacttagattcaatgtcgtttccattcattctaataagaactttggctttccaggaagaaccactagagactcagtgaattagacacagggctatgtgaccctttcttcaggggcacacctgacgttgaactgtacctacagaatgggtaggtaccttcctcttgtggtatgtccaatatcccaaagagatatcaaaatgccttgtctctgaggcatcatgataaatgaaaaggaagatttcaggcccattaagttaagattaaaacctctttccacttgcagaaaacctctatccaagcactaggcacaattgtgtacttttatgttcctaatgacacagtaggggagactaacagaggagttgagtgcaaattgcaaggggtatgagaggggctgggtgtgagcagtttctttttcctatccagacagggccctggagtgcaggagtgtatgtgggaagttggacaggcttcgtgatttgctatcccaggttaagtagcacatgagactgcatcttagaaatggggaaaggaaagatttgtcaaaacattgcccatatctgtcctctaattatagctcactgatcaaaactacaagcctagtaatgtaacgaaggaaagttctttgacatcagttatttaaaatatgtacaatgtgattttctgaaatacctttgtatttaaaatgtaatttaaattacccttaaaattaaaataaatcaataactgttttagtccattttgtgctgctataatagaatacctgagaatgtgtaatttatgaagaacagagacttatttcttacagttttggaagatgggaaatccaaggtccaggggcctgcatctggggagggccttcttgctgcaccatactatggccaaaggcagagggcaaaagagtgcatgcaagagggagaaacggataaagtgccaaactcattcttttatcaggaacccactcccaagatatctaacccactcccatgataatgtcattaatctattcatgaggacagagccctcatgaccttttaaaggtcccacctctcaacactgttgcattggggattaaatttccaacatatgaactttggggggcacattcaaaccataacaataataaaacattaatattcctggggaaaatgagcaattcacaaaaagtagtacaaatggccactttataaagaggtatataaattctttagtcatcaaagaaacatttaaaaaagtgattcattttttccagctatcaaaatagtgaaggttactgacacacacacacacacacacacacacacacacacacacacatatcatggaatttttttctgttactccaagaacctcctatggcaccatgagtcttgagccatttactatgtaaccagaaataaagactgcaaatactcaactgtaagccaagccacttctagtctaagtgcaagattgcatatttgaagagaaatatttccatttctgagaaaccagataaaattatgccaggactgaggaagaaaaaaagagaaaaaaaaaaagagcagtcaggaaaaaaaaagcagtcaaaaaaaaaaaaaagaacaaagttaagtagactttgcaaaatgacttcaattgaattacaccatcattatcaaataaatcttcaagtccagataaaaaaggaataagtgtaccctcagcactacccttttctagaagagagaaccaaaaatatcttgattcactaccgttttcagtgaagaatattgcaaatgtgaaagatggtaataacaggagcaatcaaacaatagacagtcctgagaggttactgctcttttactgtaaagctaaactttgaaatgtgaatgctaagtctttgttaacacaattataataataattacattttagatagaatttcatatttattcttgcattgttgaagttaattctattttttgatattcagattcagctttagcttcccccagatattgactttaacatctcaccattcggcatttggtcacaatgtgtgttcagtggaccatgttttaaggaaataattagacgtatgaagagggtttatgtaagcatagatttatcacaatgttgtttgtaaaaactgaaaatattgaaacaactgtctaaaatactgacatgttgtgatgtctaagttctagtggaaattattctcccttagaataagtgttgtagcgataacagacttaggagtgtggtgagtcccctttgcacaaaaagaccacctcacacccaacatgactcttaagaatgaggacagtagtgaggacacactgcagaacactgagaggcagatgacgtcttataacctgttcattaacttgccacttgggggtgctattcaccagtgaaatcataatttatgcatgaattctgagtacaactgtgaatcctcacttcaacagtgatgccctctgctaggccagagacactaacaatgaactcctctctggactttctaattctgatcttaatgtttggtaagtacattttattaaaattttttgtattatttcaaaataataaatacttctccaaaagatacaacaactctggccaaacccataaaatcagtacttttttccccctacaggaggaaccagcagcaattcagtcaagcagacgggccaaataaccgtctcggagggagcatctgtgactatgaactgcacatacacatccacggggtaccctacccttttctggtatgtggaataccccagcaaacctctgcagcttcttcagagagagacaatggaaaacagcaaaaacttcggaggcggaaatattaaagacaaaaactcccccattgtgaaatattcagtccaggtatcagactcagccgtgtactactgtcttctgggagacactgtgttaaaagcacagtgggagctatacaaaaacctcaaaggctcagaggaagtatgtagtgaggctggaaaacccaggttgtagagccctgttctctctttcacagacagtcctgttaagacattattagaagataaggaaaatcaaaatcagatataactgcctctaattccagggggcacaggggtttctttgacagaaaatggggtcagggaagagggtctcagatgatatccctgctctcaattaggtcagttctctcttgtccttcaggctttcttgcatgatgtgtaggaattagaatatgatgacttggatgtcagtcctggctctactacttattagctatgcaaatttggccaagttaattgatgtctcagagctttagtttttttcacttgtgaagtagaaataaaaataatcacacaaatttagcatggagataaagtggaaaaaaggtaggttaggaaggggcagattagtactcaaagcatttctggaacttgcaagtcccaccgtagcagttctgctctctcacagcaatctctctgcctagtgctgaccatcctaacagggcttggcatgcccactgctttgtcacaccacaccacaccccacgccacgcccagccccaggccattatgatcaacatatcatcttttctctcacaggctcctactgacactacacacaaaaattaactcaaagtggatcatagacctaaatgtaaaaactaaaattgtaaaacccttagaagaaaacatagcagtaaattttcatgatcttgggttaagcactgatttcttagatgtgacaccaaaagcacaagcaataaaatagaacattgataagttggacttcaacaaaattaaacttgtttatgcttcaaaggacaccatcaagaaaatgaaatgataacccacagaatgggagaaaacatttgcaaatcatatgtactatgtacccgatgataagggacttgtatttagaatatataaggaacttttacaactcaataataaaaagaaatataactcaagcagtgagcaaaatatttaaatagacatttcttcaacaaagatacaagaatgtctaatatgcatatgaaaagttactcatgattagtcatgagacaaatgcaaatcaaaatcacaagatatcacttcgcaaaagtaaaaggctatgactttttaaaaaggacaataatgagtcttatcaaggatgtgagaaattagaaccctcatacattgttggtggggatgtaaaatgatgctatcactttggcaaacagtttggcagcacctcaaaatgtgaaacatagaattagcatatgacccagcaattccagcccgatgtatctacccacaatgcatatgtccccacaaaaacctgtgcatgaatgttcataacagcattgtttatggtagtcaaaagtgtaagtaatccaaatggacaaaccagatgtggtatctctatacaatggaatattattcagccataaaaaggaataaagtactgacacctactacaacatgaagaatcttgaaaacattatgctaagtggaaaaatccagacacaaaatggccatattgtgtatttcatttatatgaaataccaagaataggcaaatccaaagtcagaaagcagtgtggctgccagaagctgaaagaagtggggagtggggagggactacttaatagatgtgtggggtttcttttggggaaaatattctgaactagatagtggtgatggttgcgcaacattgtgaatacactaaaagctaccatattatatactctaaagtgattaaaagtatgaattttatgttgtgtgacttttacctcaataaaaaagaagacaaccaaaaaatctaaatgtgattcttaatgggacaagaagctctaaaaaaattaaattcttactattccattgcaaacaattccaataagtatgtgaaatatggagccatctgataaaacctatagcagtacgggaaggtatactaactcagcttttaactaaaaattatacaaatgttgactgacacaaaggcaaaggagaatagcaaagatggcatgagcctttaaggaaatcgttaaaaagtggaaaccttttaatgaatgcagttaaggcttaaagaaaatgtgaagtggaacataaaaagcgttttagaacagtttggagaaatgaagagggtggggtggggaggaaggttaatttacatatcgaggaaaacagaataattttggtagagaataaagaagaggtagggcacttcgacccctggtttcatcctctattcttcatcaaatacaataattttgggccgggcgcagtggctcatccctgtaatcctagcactttgagaggctgaggcaggcatatcacccgaggtcaggagttcgagaccagcctggccaacatggcaaaaaccccatctctactaaaaatacacaaattagctgggggtggcagtgggcacctgtaatcccagctactctggaggctgaggcaggagaattgcttgaacctgggaggcggaggttgcagtgagccaagatcatgccattgtactccagcctgggcaacaagagcaaaactccatctcaaaaaaaaaaaaaaaagaaaagaataattttcaaactggaaatgaagaaatgaaaaattatgacagataaaaagatactaagagagaacttagatgctttgaaaatgatcaattcttctgggtcttttaaactaatccccaacatacaaaaagaatttgcaggcatggttggcaaggcattgggagaattttttgaaaacctatcaggaatgaaggaaatccccaactcaggaacacagaaatagtggatcgatacccagcaaaattctagagcagattattaacagataatgtgtgggctcttagaaaataatgcagtgatcagtaccaagccagaatgagctcactaaagacatttttaaaacaagtcctaaattcaaaggacttccgtggacttcaaacgtgtcaaatatttgcaagatatttaataatttgtttttcactatatcaatgggaaaaatatatatatattatcatttgttgagtgttgtgtttatcacaggccctgttgtactacatatgtaataagaactaacatttatttatcaagggcttaatgtgcatgaagtgttgttctaaatgctttgcatacattaattcacttaatcttcactacaacctcatgaagtaggtgcaatccttattatagataaggaaactatctttaatacagaagaattaactaacttgcccaagaacacagagttagtaagggaagacctggcatacaaatacagtttgacaagcccaaagcctgcattcttaaattctatactttgttacctcccaatgttatctgtaatccccaccacaaaactataattttggtattgttacacccattttatgaataaggagactgaggattggagtattgaatagaaaaatccagtagaatctagtaagtagtaagactaaggctcaaacctaagttcatttggatctagactgtatcctctattcactttgtcattctgcgtaatgctagacttggtgaattctcagctgaaagaacggccatgtataaatatacaatttagaaaaatgtccctattgttacacctcatgattttatccttcactttgacctgttcacattgatcttatgtaaattcacacaaggtatgcccattaaatgtacaaatagcaaattttgagatcggtatatgatgatcatgtcctaatgatctccagctaatatgtttatttacagcataaattaaagattgaaaatcatctgaacaaactggaaagatagactgaaactgtcaaaatagaatttaatggagataactatatatttatacagtagttttataaaaatgagttgtaatgtctggaagaagggatcctgaatttttagtatttgttgtgtaacgcgctcatagtaattaaggaaaagattttctgaaaggatattagaaattctcataaaatcaatttgtgcaaaatacagctaggactcacagaaagaagaaaatcaccaattggctatgctttccgaatctacttttctctggatgtatgatctgttctcctcctgggaaaccagattccactgtaagcctgtcatattctactccacaataacttcagtttgaacatacccagctctgtttgctaagagatgagtctggtttgaatagcacagggctttaaagctctagttacactgtctaactgcggtttctgtacctctagttcaaattaatgagcgtagtatcttcccagatccaataagctattgccagaaaaaggaggttatttggtacaagcatgacctctatgtcatctctttagaaaggaatcccaaaagtggaaaaggactacatgctcaaaataattcaccaatgtgataaaacaactgaaactatcatagataacaataaaacaagtggaaaccagatgagtacagtaatactctgacagggcaacaatatttgaatcacatttgaagagacgtgaacaaactgtagcaagtctaaaaataagaaagataaaactaataaagtagtctgaaataataccatgtgcagaaagaaacaaggatgtcacataaagaaaccagagatatttataaggacacctttacaaaaaagaacagatctggccttgagttttcaaaagatataatgtgaaatgcagctactctacttgatctatcatagctggctgaagtctaacaatcaacaagcttctgttctcccacactaccctcacctttcttctaggactcctagtaggaggatgctaagtttggttctctatctgtattgtgggtgagaggggctgtttgtttgttttagagacagggtcttgctctgttgcccaggctagagtggagtaacatgatcatatctcactgtatcctcaaactcctgggctcaagtatttgacctgcataataaatgtctacgcctcatgccactaggtggcaatgtgggtgttatactgaaaagatcacagatggttcactttgcaagtaaaactgtaaatgttcttaagtgtgcatttctgctgcttctgatgggctgaaaatcccctttgatttctaaagtaaatgtagagacgttttaaaaataaaggactcctttgtccaagatatattccgaaatcctccaacagagacctgtgtgagcttctgctgcagtaataatggtgaagatccggcaatttttgttggctattttgtggcttcagctaagctgtaagttggggagtttcaggacatgagatatttttcaaaattctggggaggggagagaagggactccaagtggctaatctggaggccctcctgaaaatgtgtaaagaaatgtgtataaatattgcaataattgtaatattctgtatctgatgatgtctttgagaacaggtgtaagtgccgccaaaaatgaagtggagcagagtcctcagaacctgactgcccaggaaggagaatttatcacaatcaactgcagttactcggtaggaataagtgccttacactggctgcaacagcatccaggaggaggcattgtttccttgtttatgctgagctcagggaagaagaagcatggaagattaattgccacaataaacatacaggaaaagcacagctccctgcacatcacagcctcccatcccagagactctgccgtctacatctgtgctgtcagacacagtgctccccaggcacctggagcccgtacctaaactctaaagttgaggcatcatttcttactcctgtctttcagacttgtctgtctctatccttggtcagatgatgtaaaatgtttaagtttttaaaatataatattctccccttctagaccatctctcttctctacaacatcatcaccaattatgttaaccagacagtatgtgatttttatcttgaaagtaaaatatacagggtataaaaatcccgattctgctacttattaactggatgatcttgacaaagttacttaacttctctgtgcttcagttttccctcagctataaaaaggaaacagtgttagccatggtacgtaaccccaattgtggggattacatgaggtaatatacacaaagggcttgacacatttcctggcacgtagtgttacataaggggtatcaattattagtattagttttagatgtaccatgagtttgctaatattcactatggattaataccacagatcattggagaagtatgtggaatataaataataagcaccttataataattttagtttttagattctttcctaatgatgtccagcacttggcctttttaatagtgttaagaaaaacagggagtagctgtagaaaacgtaatagaaggatgactctatggtttggtttgtggtgtggaaatgaaagactggtaagagatgtttctgaggaagctcagctgcttctttggaaaaaaggacaggttctaagttttcatgtggagatctctaatggaaacttgcatttgtggaaattcatgaagcaaaatatcaaacccagtgtatctaaatcaacggttctgtatatcccccaaggattctttacattactattcccaatcccagtggaattcttatatcaaaacaagttttatgattataattgttcttattactcaacaacatcaatcacatatattaaattacagctacattcttttttaaaatcaaaggctttttaaatcaaaatactacctgcacatatctaaaaagccaatagtattataaaggtctgttccttccttagcccatcaagaaaacagaaataccatgctctacccccaccttccaattcaaatccattctagcaatttctaattaatatgtatatactcttgatttatcattattaagcattatctattgacttccttctatggcagcatgcaaatactctcactttctcaacatagttatatatatatcataagctggggttaaatagacagtcagtgcatatatgattatgaccacatgaatattgccactgtccaaccaaaatgacaactatgagtatatatcctttctggtacaacgtattttcttagttaataattacatttttttcatttattctatgtcaatgtgctattttttctaagttcttcaacacagtcttaaaaatatttattaataatttctctcaaatgcttcaagcaccttaatttcttttttttcccctcaagattccctttcctttgacctccattgtttctctgtgtgaactgattgctctataagcataaatgtgattctagacattttagtaccactctcccaagttggcattcttgcattttggatctcatatcttcatttcccaaagacaaatactagagagaaaaaagggagaggaagaagaaggagaaagagaaaggagaaagaaacactcttgggctcacttttgaacaatgagagaaacaaatgaataaatggttcctgccctcccccatgccctgcaggaggaaaagtctgcggcatattccaaaagactcttcagaaggtcatgccaggatcaggcaccagtcatgcacatggtggccagctccattatgcaccattgcattggctctctccactacccaaatttgctctcttgatccctcactcctgctccatgagatcagttcccaaaaatgccctgcatgcaaacctttatctcagtctcagcttttaagggaatgtaagctaagacatgccttttctccctgtgaatagagaggacacggagccagaagacacaaccctgcccgtctgctctcagtagtgcctcatccccttcaaaagccctagatactggcctatgcagctgtcccagggactactgaccacagcttctctatcggtgatacatgttcctggcttcctgtttttaagaagtactggacacacctgtgtcactttcctgaaagaaagagtgctgagattggagggtccaagtggaattacaggctgagacagagagaagatacaggagatgctggccctaacagagagggaaaacaaaacaaaacaaaacaagaaactattcttatgaaataaaataaaaagtctccccatctgagagtccactggtctttcctgaaagccaagtcatttttccatcgaataaatgcacgagtaaaaatcaagaaaacataaacatggataaaagtttcctcatagagttgacaagattattcacagagacagacttcttggtctcaattttctcagcatcctcagagtttactgtgtggacactatgatcacagaaagaatctcaggtgccaaagctagcaattcaagttgtttctggtggaagtcagtgccctcctgtagtcaaatgaatgaactagtagaaaccactgctttggtcagtttcccctctcctgtatctggccttcagcacctcagtagatgcttagagagcacttaccaggcaccagctcccagttgatatgggaaccattagaactctctccagagaaactcagtctggcccagtgtttctgacttcaagcctcatttccatgaatcaggtagctggtgaaattgatagactgcaaactccatgagggcaggaaccatgccttggtcattacagtgtccccagtacttagcatagtgcctggagccaggagcgttctcaatgatctacgctgctttgtcatctgctctgataatgagagtttcttgatgtcaagggctgtgttttgttcatttttgtatccacaaagggattagcactgtatttaacaatagtagaaactgaagaaaaaaaaattgtgtggaattacatttcctctttttcatcagaagtgacttagtcttgctgactttctttctatgcccttgtgtgttgcctctttgtttgcttacttgatttttttgcctcactgagaatgtaaggtctgtgaggacatcggcttgtgtttcttcatccctgatatttcttttgcaaccagcccaattctgatatctagaaggaggtcaagaagtggtttttggaagaataagtgaatgtaatagttatttcggacttgtgttaaaaggcctctttgcacgatttagtagaaaaagcactggagtcttagtcccggttttgcagctaacagggtaatgtaattctgaagtcacatccccactttcggcttcagtttataacctggaaaattaggataataatacacactctacctttatcaaaaaaaatcacgatctaatctgaattagatcatgaaaatgaataccttttaaaaagtgaaaaattttaaacaaacaaaaattaatattattaaggaattttatatatatatatggaattaaatggacaagaaatattatcctaatatactccaagacaatagttttcactcccatacttatccgcactgctatacaattcagtcagtgccaaatcactacccacacacctggttgtccttattactgtggctttgcaaccttcccatcactcagcttatctaaatattctcctgtatctaaaaccagtttttagaatctccaaagagcttgttttccaacatcccccagaaacatgcatttctcaccttactgagccaaactattccccagtgttcatcctctctccaagaaaagtttttattcatttggtcattggtcaacatttttctcagctgtctatttctcaaaatgtatgttctattctactattttcttaaactaatgctattttcaccactggccaaactttgtatttgaatttgaatcttatttgaattttacattctactttggccatatctttgtaatcagaaataccagtgatagtactcaccattcggtgtacaaagtatataaaatagacatgctccatatctattaagtgatgaaaattttctaggtgattttattataaaattaaacatttttagaagaaaatgcttctttagtagattgagaagaaaatattccaggcaatgaccaacccagtgatgtcatcttactgtatatataaatattcatacttgattactactataatcaactacaatgtaaacatttcttttgaagtgctaatcggtatgaaatattctcttcaacctcagattaaatattcaccctcagtccccctcatttcccctgaaatacaatgacattaaattgcctgatctttgcattttctgatttattttatttttatttattttcctttgaggtgggctgggtacttgcaatggctaatagtgcagagctgcaattctaggcactatcagcaggtgttttaactaacacattatgtggattatttaaaaacttaatttaaggtatatgataatatagtactgctttgtatttttacaaactcatatttttttttttttttttttttgagacggagtctcgctctgtcgcccaggctggagtgcagtggcgggatctcggctcactgcaagctccgcctcccgggttcacgccattctcctgcctcagcctcccaagtagttgggactacaggcgcccgccactacgcccggctaattttttgtatttttagtagagacggggtttcaccgttttagccgggatggtctcgatctcctgacctcgtgatctgcccgcctcggcctcccaaagtgctgggattacaggcgtgagccaccgcgcccggcctacaagctcatattttaaagctccattcttagctcagagctgagccattaaagttcaataatgtaagacagcaagaatgctaaagcttgatgctaaacctattcagtaatatggaacagcatttgagatcaggaaggaggtggtcccacaactgggaattaaaatcaaaatggatttgagcagataaagctgcatgtccaaaggaagttggtgggaaaacttgaatctgccaggaattttctgctagatttactgcagatcctgccagattcaagccaagcatagaaaaataagcagaaaacctccttcatcactgcctgtgaaagaatgttgagtccaagagacgagtagagaaagacctctatagattaggacccattaatatacactgacttggcaaaccgagacctagaggcaagtacagaccacaggaccaccagatgatttactaccttggatcctactggtggcaaaagctgctcccagggtccacttccctgtacagaaaactacctcatagaaactgaaaattatatggcaatatacatcaaagagtccttgcactctgaccctgtaatttcacttctagaaatttcttctttcttaaaaaaacaatcaagtatgtacaaagattcattttttaaatgttggtgagagctttatttaaatgagtggagaaggaaaagaaaccccaatgtctcacaaaggagttgatttaaaaactgggggcacattggatataaccaataaaaatcattttatctaaacttctgcttccagccacgccgaaataacagggaccagatttaccattccacttgaaacaacagcaactgagaaggctgcagacaaatgacataaatcaacaatttccaaaacacggtatactaagcaataaatgaccatgatcctgagagatgggaaacaaatgaggcgagccctaacattgcaatagcttattgccttgagagagtttctaggccacagcacaaagaggggaaactgaggcagaacctggtaggctccctgaattgaggcaacagatctgagacagagaagactaaggcagctgaagttcataagacagaatacacgagaggagagaggggcacagagaggacctagagatctgccgagggtgccctcaagtattcagcagaatgctcatctgcgcacgcatgtggaatctacccgagggtgggtggcggcagcagggaataaccattcaaaaagattaaaggaaagaggacctcttcaagtatgtctagaatttagaaaagagtttattgcttagccatatatttcttaattctttaattaatatttcatacatttcattttctctggctctagtcacttatcactgtggtccattttcaaacaaagaatcatttcacatattgaggaaacaatatatgaatagcctgtctggcttagataaagagtaaaggcaagagaccaggtgcggtggctcacgtctgtaattctggtcctttaggaggcagaggtgggcagattacctgaggtcagaagtttgagaccagcttgaccaacatgatgaaaccctgtctctactaaaactacaaagaagtagttgggtgtggtggcacatgcctgtaattgcagctattccagaggctgaggcaggagaatcacttgatcatgggaggcggaagttgcagtgagtggagatcacgtcactgcactccagcctgagcaacagagcaagacttcatctcaaaaaaaaaagtaaagacaagaataagtatcacccatatggcatgaccaaagtttttggtaaacctagggttttttttctgttgtcagtaataaaattgcccttaaaaactagtttttatttctcattcctgaactcatttacatataatgtcgaagtatgataaattcaaactatgctgacacctgtacgaatgtggcttagtatgatataaagtctttatactttcaccaacttcaaacctcagtttctactgttataaagttcatttcactctctcttgtgaccatttaaatactttcacatatttcatcgcatttttcatcttctagggctgaggactcctaattcttaagaatatttctgttatccctataattactgtcgtgtctctccaggcattcttttttagtgaacagttgtcattaatcacttccagaaaggattcaaacaccatctctacatttatccttccaagtgctgtgactattgccttgcgaactacattttccaggctcccttgcagctaaggtgcagatctgtattcagccaagtatttgattgggagatgagccatatgaggaacaggttaggcaggggcatcccttttcttggtttaggggcagtggaggccatgtggtctgggttaggcagcaacagcatcttcttgattgggccaggagcagtaacttcctgtttgggcccatttggctgcatattctgttgctggcagcactggaggcagctggcatagggataggactgcagccttcttatgaggctgatggatgggtggttctgggcatcactcctggaagtcgagcctagaatctttttctccagtctgcccaatgattctatgagccttctgcctccccaaatcctgatctgcttacactaggtaaagcgatttcctttctttcttgtcccttagcacacagatatctcacagtgtttagtctgagacccaccacagctttcattccagcatcctttaagctgagtatcagacctggttcactttttcactgcagtacacttggctcattccaatgaggatgacttcatgtttatagtgatttctggttcctttgcttggaaatcctaaaagatagaaaagagtctccagttgctgcagacgcaggcatgagatataccgaaaactctccaaaattgtctcttggaatgtttcttcattacttcactaggtttctttctaaccttcagagctagtaaggaccttggattaaaagggccattgaatttctagtttagttaagaaatattttcctcatttcatgggaggggggaagcagtgcagactaaactcagagcccacatcatgttgttcttaccagttcaaatcaaatcacggtttccagtcacttggctaatatttatccttctttaaatcttgatgaaatgtctcttcctcaatgaacacttctctgcccctcaacctaaatttgttcccctcgtgttactgttttaaagaaccctgtaatttctatgtatttctgtgtgattatttgtataatatctgtccttcctattaacctctaagttccactaaatgctctgtgttcagaatagtgcctggcacaaaggagtatgacaaatagtgatgagtgaatgaatctgagccatcagacatgtatcttactttgtgctgggctgtccctcaagtgtagatgttcctagtgacaatcccattaattcaaacactgactggagaggattgaaaacatatgaagcagtgcttttggaactgaggctgtagtccaatatgactggagataaaaaatgaagactttaaaaacagaattcacataaaagcaggtatcaacatggaaaactgcagaggatgcctgtatacacagtgggcacagcagcagcattagaccaatcacctccaaacttgaggttccaggctgaggtgacagatcagagtgaaccaggcaccgtagaacaatgggaacacttagattcctgacactggaatttgctgattcttctactaacgtgtagcaagaaatttagccttacccaaagtcaggtctggtctttgtcccagttcctgggagataacctctgaaggctcggaatttcctgaattgttggcatgtctttataattgatggtggggtccttggaccacacttaatagtttctgctatcaagatgactcattgtgaggctggccacaatcaatggtctcaggatgggggctggccatgccagaaagaccaaccatataacatagggtggagggtttgtgtcacaacctagagagtgagttcaaccacacaggctatcagtcatctgatataatgaagccccaataaaaactctggacaccaaagctcagctgagttttccagactggcaatattccatgggtattgtcacgccttgatgctgggagggtaactcatccctgaggacagtggaagtttcacgtttggaaccctaccagactctgccctatgcatctcatcccttggctgcttttaatgtatcctttctctgtaataaacgaatcacaagtatactaggtttcaatgagttctatgagtctttctagtgaattatggaacctgatttaggaaatacccaaccttgccattggtgccagtagtgagagtggtcttgcatgaacttatctcccctttgtagttgagtcctagcgacttacagttgggggcagaagtcttatgtagatttagtctggaggtctatgaccttaaccttgcagtttggctaactctgggtagctacattttgtattgagcaactctatatgaataaaagaagttttgttcatataatgccttaacagtgaatcaagtatatcaagaaagttttttaaaagttaaaagtaggcaagtctactggtaataaagtaggcaagtcacaaggtaattaaatgcctacgtttcaatgattacacatgttgcttagaacatacacatatatgagatcatcacgttaaaatatttctaacacacaggctggcaacacctaacaataataataattagtaattgtctagttcttactactaactggtttctgttctgagtgttctacatatattaactaatttaattctcataagaactctggttattagccaggtttgtagaagctgaggcacaaggaggttaaatacttcgccctatggcacactcccaaaatttgaatccaaaccatccaactccatagctcatgctcttaaccaatgccccatacagcttctcagaaggcaatcacttgaaatttctctctgatcttatagaaaggtgttagtagactggttatcttaacgtccaatcccaatcatctttgtagcaaagtaatatttttatatgaacatgtcagaggcatttgaaccagagcaactccatcttgaataggggctgggtaaaatgaggctgaggcctactgggctgcattcccaggaggctaatgcattcttggtcacaggatgagataggaggttgacacaagatacaggtaataaagaccttgctgataaaacaggttgcagtaaagaagcctgctaaaatccaccaaaaccaagatggcgacaagagtgacctctggtcatccttattgctacactcccaccagtgccacgacagtttacaaataccatggcaatgtcaggaagttaccctatctaaaaaggggaggcatgaataatctaccccttgtttagcatataatcaagaaataaccataaaaatgggcaatcagcagccctcaaggatgctctgtctatggagtagccatacttttattcctctagtttcttaataaactttctttcactttactatatggactcaccctgaattctttcttgcgtgagatccaagaaccctctcttagggtctggattgggacccctttccagcaacaaagagatgtgtattttatttctgaaaatacttttttgctttgttatcattctcatgttaggccagcagctcaggaagtcctggtctccttcctatattggaaaagggagttcacaatgaacacaaaagaagaaaggataaatttgaaaattcctctggagacaatagaatggaaaaaaggggttttgagtttgggttacgacttttgagtttaaaaataaatctatgcctcaaaaagttctcttagaatatatctgaatacaaaaaccaattatgcaaccctagatttaatgcaaatttcttagtttctgggaatttctggggtgatggagacaaaagcaagaaagtaagacatcagtgaagatctctgcccatctccacataccctcccagcagtggggtgggaggaggcaatttttagcccccaaataggatgttaggaatctgaaactagaggagattgacaactaattcctctcagaaagactgagtgacagtatcctgcaaatttccaccagggcagagacagctgtgcagtagtgccaataggcccagagagcccaagacagccccattctgccagactggaattagagtagttgaatttttgcatgcacacaaaaagcatagaaattaacagagagagacttagtggacctggatgggtgtcaatattataataaaaaggatgcagagcatatagattaacagccagagacctacagggactcagacatcaggacattagaaacaataatgtcccagactggaccctaagcactgcaccccaacagatgccagtatgggccaggtgtccccaaccaatgccagaccaccagttaaggcctctacattccaccccaaggatggcgaggaggaaatctgaactgatggaagacatcctgaattgacttagaaagtcatgattttactgagaaaaccctgtatttacttaaagcaagctttctgacaccacgcaaagtggttaccagagttagaaattaggctgttatagaaaataaagctatcctggattgaacatctgagtaaattacaaaacatttacccgctacatctctattcaccagatagcgaactcaagcattcctctgcccctacataaatgacaaatgacattcacgtgtattacatatcccctcaggcctaactagggctgtgtgctgtttccaagaccaaaatgtcacaactgtaaaccactcacctggatacttgctataagaaatagcttggattagtatggaacttggtgtaaccctcaaatatgggagtttgtcactagaggtaccagaggaccacattctctgttaggggacctcgatgacagtatattacaatgaaggcagtgactggcaaacagcagcttcaaataggcatgcaaacaaacattgagaaacagtaagcacataagataactcatttagacacttttatatgcagcatgtataggatttaaaataacattcccaagttaaactgaaaccattactatgtaaatgccacagccaagtcaaatgaaatagtaaataccagccttgcaaattggtctccctcaagggcactcaaaagagttagactgcgtgctgctgccttaggaaatgtcctcctctctatcaatcatttctgctttgacatcaaacccattgaccagcatatgttttggaatttctgaacaactgactttcaaggattcacattcattctgcactttcttagaaacctcacaggagccactgttgccaataaaataaaataaaaaaacacaaacattataaatctaaccccaaaatgggattgcttcaaaagagaatggacaccccactccctacattgcttgtacacatctgtgttgattctcttggtgaactggcccatgcaagcaggagctcatcaatcagcagttgtcaccaagtgcaagtcagaattgctcaacagaaaaattgagtctttttttattccctattgtcacctactaaaatgtaagttgcttgttgatctcatcacactgagctatgtttcagggaagtgttgaaaaggcccagcctgcgcatattcttgaaattttgaaataatggctcagtgaacagatgtatactttctcccaatggctctttgtggaaatgaattttttatgagcccaaagtatctttgattcatccctgattaaaagtcaggttaaaactaaataccatatactttttgaaagacattttaggaagttattgacacaaggacttttgagactgaaaatcatgggttaacaataaacctttgtttggtgaaacaaaagaacagtacaggacagaggtgaaaagcacaggctccagggccagagtccctgggctcagattcttcacatttcagctctgtaaccttgaacaaactactccagttaatcataacttcagtcttttttaaaaaatgggatattaaataatgggtattaaataatagggttgccatagaggaaaatataaggtaatatttatatgcacataaaacagtgcctggcacagagccagtgttcaattagtactagctattttttggatacatgtagataaaagaagcatttaatgaatagttacatgcccattaacataaaatgtaagccacttccatattctgtagcttatggtgacaaagttttctgctcacgtattaactaaaaggagcgaagagcttccctataatattgaaaattttatcctaatggttccaaaggactgttttctaggaatgtttgctacagaaacctcactggttagatgtttgttggagcacactgtgattattcattgtcactgcaaactgtgtttaccacgggaggctgttctgactcaccactttgtgactcaccgattagtaaacagctaaatgtcgcattgctgatttaggtgtaatttactgcgtcaatataaaaggactctgcagattctactaaaatcaagaacatagctaaaggcattcttcatcgtaaaaacgaattttagaaaacaagatgactctaacagagttactttaaaatacaatgcaatatgtctattttaaatgacaacaatatctcctgtctgacagcattcaacttactttcagatttattcggtgttttctcaacttcacgagaaattgaaaatccataaaggagggaaatatgtcttgtttcattttcaatagttatatcaagaatacttttcaaaagtatttcatatttaccatgttttcagcaagtaactcttaacaatactctgagagtatgatcgtgatgataggtaaaaatcaggatcactcccttttcatctttacctgtgtagagcaatgtaatgtgcccttttcccaaaccctctgactccatgagggatgagacacagagggtgtggctgagggctcctaggaccgggactccttggctgatgtcctgtggcctgcagtccagggcttgcaggtgatcaaacaggaaaggagaaatgagggaggcacagtgctacgagcaggcctgtgttttcactgggaatggtggttagcagatgctcagatgtgtctcttctccctcacactcacctttggcttggctcttaactcctgcccacccctccctaaactctctgtggaggtccggaactaagcgagtcacagacacccagcaagcagtctccagagaggcctctgtgcatgaagacttccccagaaggatgcccactcttcctacctggcctgggaactcaaaatggacacaaaaactgaagactgtgagagagggtcagcttacaggccagaaactgacaataagattgatgttcaaatagctgaattattgattcttatcctgagatccactcctcattttcagtcttgcgataaaccttagtgaggggtgttttgtcttgtgttctatctattggtggatggattccaacttttctgaatatggggacgtaatttttaaagccaaaaattttgcagatagtaatggatttttaacatccattgattaacaaagtactatgaaaacagtaacacttttaaataaatttgctttcagtttttttaactaaacataatacatgcatgtatatatttaaacttatcacactgcctggcacagtgaaagcactcaaaaaatattagctataattactcctattgctgttgtttactcaatcataggtaatgcctggtatacatgtggattcttagagtccttatagaacacagcagcacataaactatactaggctctaaatcttctctcccaagaacttcatctgatgcatatttcaccagcaacagcagcatttagcactgtcttgctgtagaaaaattcttgataaattaattgaattaaatttatgtcacataaaatgtcatgaagagatggaagtgtcttggtcctgtatcttagcattttcaaacctctccattgtttttttttaatgtatagatttcacctgtgtaaaaattaaaaataagaaaactgatcctaatgctcttcatgaaaggcaagaaaagccttcttggaaagcaatagttatgggagagttctgccagaatttgttctcagaatgacatgagaacaattttattctaggaaatagaggtgctgaggactcagcttctgacctaccctagatcataaacatcactgcactaacagccaattaagaataatctaagctcttgtccttttataacagacctggttatgtcctaaaaaataagagcatttataaataaagaagaaagtttaacagttcaatagatcaacgtgactttccagctcctctctgaacaggtgacatctatttccccatcccttgaatctcagttggccttgtaacttatgtggatcaatagaatgtggccgaagtgacagctgtgcaagttctgagccctcacctcaagagcctttgcactctgtcacctgctctctcagacctcggcttttttccacgtgaataaaccgaggctaaccttctggaagaaaagagaccatatgaaacagaaccacatcagcctgaggccctggacatgtgcgaaaactgaagatcagcaaagctgacctgaaactgagtcacagttgacctcagatgcatgagaatctaaccaaggctgaaaacatttggttgaatcccacctcaatttctgacccagagatagcaactaatgtacaatatcatgattgttatgcagtcattagaaagaatatattagataaatgtgtattggcctggaaaaggtatcatctaagtatgcttaatgattatccatcttaaaaaaaaaaatacagaaatagggttgtagaacaagggtcctggtcatactgagcttacacttctgttgatgaaataaaacacatatgagatgatgaggaaataattcaaccaacaagaaaatactttacaaccaagagacttattaaataaaatgggtgcaccttttataataccaataagtataatagtaccctaacacagtagacacatttctgttgtctgtagttatctttcagaaagccgtcttgggagaacctttaaatgacctcagagagcgaaggtttatgtaaataaagaattaagtcagtgtgggtagaggttcagcaccagggtgcaggaagttatgtgaagattgtggtatggggctcatgtctagaaacagagagtggccccatgtcagcctatgagggaggagccaggccccacctcaagggtctccttcaggaagatctctgtgggaaaggagcaggggttccaggttttcagcaaagcctgtgcttgggcaatccatcaacacggttagtccagggcccacatataacctctgacccttctcacatttattttctctgtctggtacttcctctaaggagcatcctgccactcaccagcccctaccaaacacacacacacacacacacacacacacacacactcatactctatttgctcataatctcataatcatccatcaggttttaactgagatagtacttcttctgggaactttctctggtgagagatcctcttatgtggctcttgacctaccaaaccagaagcagttgtgcaattagtgatcattattctcttatttattatagtatctccagcacttagcacaatatctgcagacagtgggcacgcactgaaaaaaaaatactttttgaatcaatgaattaaatagctagttttcattcaccctaagaaaataccaaacattggtcttaagaatgtcacaggcctgaaggtataaaggaggaagcaaggaaacaaaatcaacagacagagccttggcaaaatctgctgttcaccagtcctcccagcaaatccatttcccattctggggaagcaatgccaaacagctccaggaactctgtacatggtctgtcaagtatccaagacagaagggagacttttcaagagtggaagcccagcctgcttgctccagtctggactgtgctggtctgtattttcctagtcagggatggccccaacctgggactgtgtctcctctcaggctctgaggccttgggaatggaggaatgtcgtatctgccagtggtttaggtctgtattgtgaagaattaactttcccaaacagagatctggccttcaccctcagctgctgggtggtgattcctaggctcctggattgtcctgccagataggagaatctttgtttgcctgagggctttggccaccagtcagtctaataacgtgatatatgatggggctttggaacatgccatgtgaattctgacctctggaggaaccagagatcattagctagaacctccaggaggggctggaggttaaaggtcagccacgtgggcagcgtgtgataaagctccaggaaaaactctggacaccaaaggctcagttgagctcctatcttctgcaacactccatgagttctgtcacacaacatggctgggaggaggtaacacacccaggtctccctgggagaggacaaccagaagcttcatgtttagaaccctcccagatttcacccaatgcttctctccctttggttggttctgatttgtacccttttgctctaataaactatgatcatgatcactttcctgagttttgtgtgttgtttcatggaactatcaagcctgagggagcatgggaactcccagatttgtagccagctagccaggagtaaaggcagcctggggacccggaacttgtggctgatgtttgcattgagggcagtcctgtggaggactgtgcccttaacctgtgaagcatggccacctcccggcagttgctgtgagaactcattgcagggccactcagggaagtgtgggaaattgaaccaatgatgcctgacaccacggcttcctgactatcctctaggaagtctatcaggagatgcccctgttcacttccctgtaggttccagcgaggctcagagggtcatcagttctaccaacaatatctgcgcagaagagagtagctgtgattttattttagtctgaaagaacactgtttgttgttgattaacacctaaatattacaaacagtctctcagtgtgagaagatttatcttattctcctgtgtaattagaatgattattcaacaaatggatgttatctagcgaacttccagaaagaagccaaatttatcaacctcaccaactcacacatacagccagggatctatattcttgtgctctcagagaaggcatggagcttggactgacagcaaaagaccaacaaaacacccagaagccagtcaaaaatggcccaggctgcaggatccttgaaagacctgaaaacacacgaggaaaaggctgggaaatagtaatggtgagtggacctctgcggtctggagaggaaactactggttattttaggaaaaacattcccataatggggctcagggaaaaaagaaagtaatggtatccaggccttattctcagaagcattctcctccctgaatccagtatctgaggtaactgagcagcagataaaaatagcattttctcgaaacaaagcaaaacattaaaaaaaaaatagcctactgtctaagcttgtctcccagtggaactcaggaaccaagccagcttctccagctgtgcaccttggctgtgtgtctcagatggaacatttctgacttcattccctcctcctcccacgtcactcggtaaggagggtgggccaggacaagcagctcagacagctgttcctacagctggccttaccacaatcccccaggcctcacatacatgcacctctgggccctgcctgcctgcactaaaccatccggcccagtgcaacagaccattctttcaagctgtctctctcctactcacaaccatcccaggagtcctcttaaaactattttttcggagaacacattgtgctttgccacactgttccatttatctcttggtggccattccatttgcctcagcaactctctatcccattttttagtactacccctgaacgagaaggcaatcttgttcatcttgccaactctaaatccttatcgcaatcgtgttgctttagattgcattcatgtgtgaataggtgtggataggtgtttggcactgtgttagatgccaaagatacagtgctaaggaaaaaacatacctgacaacagattttattatattccaacgggaaagataggataaacagatacataaacaatgtatatgcagattaggatgagtatcatgaaagcaataaataagaggctgacgggttcaatttaagtggggtggccagaaaatgcttttccttcttctgagagaagtgagcgaggggcacagagaagtccgaattgttacactaatgaatatttctgagcttgaaaacacaaaacaaggggagatgaggttccactcaacagaggtatatacacatcaattacatgacccagaaaacctgattcagacacaccttgctgacactactccatagggaaggtcattttcacttgtccacatctaccacacctccattttcactctccctgagataaaaggatgtgcatttacactgtgtctgcctagcgaaattgtaccccccgctgaataaagcacagttagttgagattcacgaacaccaagcctctctttataatgactttagagagctgtgctaactgaccagcactctggatacttatgagcagatgtctggtagcaatggaacctctcatgaccacccaggctctaaatgactgttcagctcagcagctcattatcaccttcctggagttagagctccaacataagaataaatatctccatctagtattatcactttttaaatcaaaatctatattcagcttgagagtataaatatcaaaatttcagggcattttttctaacttttcttgggagattttagtaaaattccagggcagattgctgaaagtacaatctgggaacagaaactaatatagtgtcacatcatatgaagttaacctctttttcttatgcaattctatcaaacttcaaggaaattctttggaaatctgagccccactacatttaaaacaaaataggtctatcatgaaatgcctaataaaggttgatcttacagtgtgatcgaggtgctatgcagatctgagacaggtggattattccagaatgagaaagaaacacaggatgaataagtcgcactaatggcaatagcaacttctgggaaacaccaatttctggcagctgttgctttcgtcaacactttctcagcaaaattgccacagccatttctgagagcttagaagcactgctaggaatctctaataggagtctgtttaatgggaattcctattgactacagccgcttttgcatataggagataatgttgagctaagggaatctttcaatgattcattcaaaacatgtttatccaccatgtgataaacattatagtcagtgccatagtataaacttgaataatgcataatccctgcccccagggaactcacatccttctcgacatgcctagcacaaacacacagaattataataaaagttgtcaagaagaagatatgggtggcgcattatgcaagcagagaaaaagggactgccttattcatttagaagctactggccctctctagagattgttggtcttccagtacatctaaatattcttcaatcgtaaaatgccatgaagctagaagtacaaaatgctgtattatcagttaagccccctatttttttctttttttttttttttttgagacagagtctcattctgtcacccaggctggagtgcagtggcacgatctcacctcactgcaacctccacctcccaggttcaagcagttctcctgtcttagcctcccgagtagctaggtttacaggtgcatgccaccatacccagctaatttttgtatgattagtagagactgggtttcaccatgttggccaggctggtcttgaggtcttgaactcctgacctcaggtgatccgcccaccttggcctcccaaagtgctgggattatgggattacaggtgtgagccaccatgcccagccagttaagcctcttaaagaatgtcttgaattataacaaacacatgatgcctatcttcccccatatctttatactgacaaaattaggttcaaaatcaaggcatggtcaccagaaatcaggtcagagggatcaagaaaacatggacagtgaagtgatttcacttccatacaggtgataaatatttcctaaaatacaggtagatgtgtggcacaaaacctccagactctgagcatcaaagtccctcctaataccagaaaggaaggacccagcatttgtcatctcagtctcagacaaatacatactcagagggcctcaggaacatatgtaaactaaaaaaaaaaacatgagaaattgagcaggagcctgagtttgggcttccttgggtgggtactgtattaatttcccataacaaaatactatggaatagtacacagatgtttctttcctcacatttttggaggcaggaagtccatgattgaggtgtcagcaggcttggattctcctgaggcttctctccttggcttgtgaatggtcatcttctctctctctctcttcacttggtcttttctctgtgcacaggcatcctttgtatttctccctcttcttataaggacataaatcctactggattaggaccttacccttatgacctcatttaacctcagttaccactttaaaagccatatcttcaaatacagtcacattgggggctagggcttcagcatatgaattttaggaggacagaattcaatccataatagatggggacagggcaattctcttcctaggtaagccttcccttagggccatttacggggagataaacaaaccccaatttctactgagcaaaagctcagagaccctgaagtaactgcagttagtaaatgagaaagacagaatattttcaatatcttcaagtctaatacctagaagtgatagaggtttattcacattttctcccagtcattttcttattctgtgtttatacagcatttctgttaatgacaccattattttcagaaatcaaaatgaaatcttaatgttatcattgactctccccccttccttgccttcacttcaatcataattttccatgtctatgtaagtattcttttggctatttacatattcatcagaaacctatttcagctcttattaattttcatgaagatcactaatggaagccacctattgttcatgcttctagttcaggtgctcctaatatgggaactgtatagtttcagttgatctataacctttcaccccccaggttttgtggttgtttttatatacactttcacacatataagtggtaatgtgttcattgctattatcagttgttcaaagtgggtccctcacccacgaacaggttaaaagccagagctctcctctctcctactacacttgctccttgtaaaaaaaatttaatctttgtgattaacacaattgtttatattcttccccctactcaaatactcccagttacaaacattttaacttgtagtttaaaatcgttcctggtcagcaatcccttctgtagactcttccaaaaattaccatggttcttataatcaatctcacacccaaaagaggagattttagaaaggcatagacaccagaaggcagggatatatctgtctaccacagtccaccgtctggccaccaatgactcacattaccctcacttgcaaaaatacattcacatacatccccaaaggtctcaagaatcttatctcacagagcttcagctcaaagtcaaacttttatgctttaaatcatggctaagttcaaacacagctcctgggcataatatatgaagtacagctcctggggtataacttctctccttctgtcaacctgtaaaactaaagaggcaagtgatctgcccccagtacacccgtcatacaattttgaaacaggcataactggtaggcatgggataacagctatagacatattggttcaaagggaggaggggaaaaagataacaaagagtcgttggtccatagcagttctaaaatctagctgggcaaatgttgggagttcaatgattaggttttagagcctaagattaatctcggctattggggaaaccagcccccagtatttcaacgtaggttcttttctattttccctaagtgtcggccagtctgagaaataaagagaaagagaacaaaaaaaagaaattttacagctgggtctccggggttgacatcacatgtcggcaggttccatgatgccccctgagcctcaaaaccagcacgtttttattatggatttcaaaaggaggggggggtgtatgaatagggtgtgtgtcacagagatcacatatgatcacatgcttcaagggcaataaaatagcacaaggcaaatgggcaggacaaggtcacaaggccagggcaaaattagaattacagatgaggttccctgtcccactgtgcacgtattgtcattgataaacatcttaacaggaaacggggttcaagagcagagaacaggtctgactagaatttcatcaggctggaatttcccaatcctaacaagcctaggggcgctgcaggagaccagggcttatttcataccttatctacaactgcataagacagacactcccagagcagccattttagaggcctccccctgggagtgcattcttttcccagggctgttccttgctgagaaaaagaattcagtgatatttctcttatttgcttttgcaagaagagaaatatgactctgttccacctggccccgcaggcagtcagactttatggttatcttccttgtttcctgaaaatcactgttatcctgttccttttctaggtgcccagatttcatatttttcaaacacacatgctctacaaacaagctgggcagataacacaatcattacaggatcctgaggcgacatacatcctcagtttatgaagatgatgggattaagagattaaagtaaagacaggcataggaaattgtaagagtattgattggggaagtgaaaaatgtccttgaaattgtcaccatttatgttcttctgccatggcttcagccggtccctccgtctggggtccctgacttcccacaacacttggctctaccctcttgcctcttagcaccaccctctatcatccttcttctttaatgtttgcagttgagtagttttatcagcctgcttcctgccagtagaaatgttggggtctgacagcctcctttcatttcattttgtagtctttctatccctttcagtccaagccagtagtgtttctgctgaaataattttctcaagatctttgtgcatctaccatagatttcaatgatgttctgaccatcagaaaaaaacacacccacagatcttttccagacagcatatatttttggctcctgctcggatggctgaggggctacagtttgattgagtggatctaaaaggcacattcttaatctccttaaggagtcctttgtgccattgaatattctcaccttttagtctttgaggtttttttaacttttattttgagttcaggagtacatgtgtaggtttgttataaaggtaaacttgtgtcatggggtttgttgttcagattttttcatcacccaggtattaagcctgggtgtacacattagttatttttcacgatcctctccctcctctcaccctccaccctcaagtaggctccagtgtctgttgttcccctctatgtccatgtgttctgtgttatcatttcgctcccacatataagtgagaaaatgctgtatttggttttctctttctgtgttaatttgctaaggataatgacctccagcttcatcaatgtccctgcaaagggcatgatctcattattttttatggctgtatagtatttcatggtttatatctatcacattttctttatccaatctgccattcctggccatttaggttgattccatgtctttgctattgtgaatagtgctgcaatgaacatatgcatacatgtgtctttatgatagaacgattattattcctttgggtatatacccagtaatgggattgctaagtcaaatggtagttctgtttttaggtctttgaggaacagccatgctgttgctcctaatggttgaactaacttacactcccaccaacagtgtaagtgttcctttttctccacaacctcaccagcacattattttttgactttttaacaatagccattctgactggtgtgagatggtagctcattgtggtttttatttgcatttctctaataatcaggaatgttgagctttttttcatatgcttggtggctgtatgtgtgtcttcttttgaaaagtgtctgttcgtgtcctttgcccactttttaatggatttttttcttgtaaatttgtttaagttccttatagatgctgcatattagacctttgtcagatgcatagtttgcaaatattttctcccattctgtaagttgtctttttagtctgctgatagtttcttttgctgtgcagaagttctttagtttaattagatcccatttgtcaaattttgcttttgttgcaattgcttttgatgtctttgccataaaatctttgcctattcctatgtacagagtggtattgcctaggttgtcttccagggttttttttataattttgggtctttaatccagcttgagttgattttttttgtacatgatgtaaggaaggagtccagtttcaatcatctgtatatggctagccagttatcccagcaccatttattgaatagagagtcttccccattgcttgtttttgccagctttgttgaagatcaggtagttgtagccttatttctgggctctctattctgtttcattggtctatgtgtctgtttctgtaccagtaccacgctgtttttgttagtgtagccctgcagtatactttgaagtcaggtagcatgatgcctccagctttgttctttttgcttaggattgccttggctatttgggctctttttttttccatatcagttttaaaatagtttttctctaattctgtgaagagtgtcattggtagtttgataggaatagcattgaatctataaattgctttgggccgtatggccattttaacaatattgattcttcctgtccctgagcacgggatatttttccatttgtctgtgtcatctctcgtttctttgagcagtgttttgcagttctgcttggagagatctttcacctccctggttagttgcattcctaggtattttattctttttgtggccattgtgaatgggattgggttcctgatttggctctcagcttgactgttattgctgtatagaaatggcagtgatttttttatgttgattttgtatcctgagattttgctgaagttgtttatcagttgaaggagctttggggccaagtctatgggtttttctagatatagaatcatgtcgtctgcaaagaaggataatttgactttctctcttcctatttggatgcaatttaatactttctcttgcttgattgctctagcaatctctttggcctgaaagccccctgaggacaaatacatcagtcaactgtttctttgtttgttgtttgttgtttcttttaaattattctcattacttagcacagatcatgtacaccatgagtgtttaataatatcaatagaatatttgggagcaggaggttattttgcttagttttatgctttcactgttgttatagaacagctgggctagaagacattattaaacataaatacaactggtaaaatatcccagcagaagaaatgctttaaaaatatctccaatcactgcaggagtgcagagaggcaacaactcctccagcttttgcacatcgaataattggtttagttcactccttccacatcacttggagcagcggggagggtggggaaagcttaatgaccaggaaagcctttcataaagtcatcatcaatgttctttataacctaatgtcacttcaatagtccatggttttcaaataaatgtcctacctgcccacagactgaaattttagccaaataaatccataaatttaaacatattgacaatcaaaatggtaaaaagaacttttatttttaacttgtaaaaatggttttagaggtcatcaggaagaataaatgagatacatagccaaaaaaaatttaaatacttgccacatcagatattagaatgtgttctaaagctacgctaattaaaataatgaggtaccaatacaggaataggtaggtagagcaatagaagcattaagtataaacttataagagactcaagttataagttacaagaatttgacatatgttaaagttagcatctcaagccagaacagcatgtcaataaattgttgaaagacacctggataaccatcaggaaaacaattaaattagatccctacctcaacaactaaattccaaaggaaaaagactcataacatttttaattaaaaagcactggaagaatatatagatgaccttttacataactttgaaaaaggagaattatgttataaaaatcacaacaaaggcagaaattataaaagataaaattgacagatttgactaaatacatctttaaacatgtgaatattaaaacgctgtaaaaaattaaaagacaaataaagtagaaattatctaaaatatatatcaaagcaaaaactgcatttctatatgccactggtatataaaaatacttccaaatcagtaaatacaaattgcacacaaatagaaaatgatagaagaagctaacaggcatttcacaaaagaagattataaatgactgataaacacattaaaatgtctattactacataattaaagtaattctgaaaccaataaagtacttttttctgcataattctagggatttatgcttaggaaagaatttgtaataaagatccacacacaaggatatctatcagaatgtagtatataacaccacaaatcataaatgagtcaggtatggtggctcatgcctgtaatcctagaactttgggaggccgaggtgggaggaccacttgcagacaggagcgcaagacctgcctgggcaacataatgagatgctgtctcaaaaattttttaaaaagaaacaatttaggggggcggttccaagatggccaaataggaacagctccagtctgcagctcccagcatgagcgatgcagaagacaggtgatttctgcatttccaactgaggtatcgggttcatctcactggggcttgtaggacactgggtgcaggacagtgggtgcagcctatcgagcatgagccaaagaagggcgaggcattgcctcacccaggaagtgcaaggggtcagggaattcccgttcctagccaagggaagatgtgacagatggcacctggaaaattgggtcactcccaccctaatactgcacttctccaatggtctcagcaaatggcaccccaggagattacatcccgcacctggctcagagggtcccacgcccacggagccttgctcattgctagcacagcagtctgagatcaaactgcaaggctgcagtgaggctgggggaggggtgcctgccattgctgaggcttgagtaggtaaacaaagcagccaggaagcttgatctgggtggagcccaccccagctcaaggaggcctgcctgcctctgtagactccaccttggggggcagggcatagcaaaacaaaaggcagcagaaacctctgcagacttaaatgtccctgtctgacagctttgaagaggatagtggttctcccagcaaggagtttcagatccgagaatggacagactgcctcctcaagtgggtccctgacccccgagtagcctaactgggaggcatccaccagtaggggcagactgacacctcacatggccgggtacccctctgagatgaagcttccagaggaacaagcagcagcaacatttgctgttcagcaatattcactgttctgcagcctccgctgcagatacccaggaaaacagagtatggaatggacctccagcaaagtccaacagacctgcagctgaggatcctcacgttagaaggaaaactaacaaacagaaaggacgtccacaccaaaaccccatctgtacatcaccatcatcaaagaccaaaggtagataaaaccacaaagatggggaaaaaacagagtagaaaagctgaaaattctaaaaatcggagggcctctccccctccaaaggaatgcagctccttgccagcaacagagcaaagctggatggagaatgactttgacgagttgagagaagaaggtttcagatgatcaaacttctctgagctaaaggaggaagtgtgaacccattgtaaagaagctaaaaaccttgaaaaaagattagatgaatggctaactagaataaccagtgtagagaagtccttaaatgacctgatggaactgaaaaccatagcacgagaactacgtgacaaatgcactagcttcagtagccaatttgatcaagtggaagaaagggtatcagtgattgaagatcatgaagtgaagcaagaagagaagtttagagaaaaaagagtaaaaagaaatgaacaaagcctccaagaaatatgggactatgtgaaaagacaaaatctacgtctgattggtgtacgtgaaagtgacagggagaatggaaccaagttggaaaacactctgcaggatactatccaggagaacttccccaacctagcaaggcaggccaacattcaaattcaggaaatacagagaatgccacagagatactcctcaagaagagcaactccaagacacataattgtcagattcaccaaattgaaatgaaggaaaaaatattaagggcagccagagagaaacgtcaggttacccacaaagggaagcccatcagactaacagcagatctctcagcagcaactctacaagccagaagagagtgggggccaatattcaacattcttaaagaaaggaattttcaacccagaatttcatatccagacaaaccaagcttcacaagtgaaggagaaataaaatcctttacagacaagcaaatgctgagagattttgtcaccactagtcctgccctacaagagctcctgaaggaagcactaaacatggaaaggaacaaccagtaccagccactacaaaaacatgccaaatcgtaaagaccatagatgctaggaagaaactgcatcaactaatgagcaaaataaccagctaagaacataatgacaggatcaaattcacacaatattaaccttaaatgtaaatggactaaatgctcaaattaaaagacacagactgtattcaggagacccatgtcacgtgcagagacacacataggctcaaaataaaggaatggaggaagatctaccaagcaaatggaaaacaaaaaaaggcaggggttgcaatcctagtctctgataaaacagactttaaaccaacaaagatcaaaagagacaaagaaggccattacataatggtaaagggatcaattcaacaagaagagctaactatcctaaatatatatgcacccaatacaggagcagccagattcataaagcaagtccttagagacctacaaagagacttggattcccacccaataataatgggagactttaacaccccactgtcaacattagactgatcaatgagacagaaagttaacaaggatatccaggaattgaactcagctctgcaccaagtggacctaatagacatctacagaactctccaccccaaatcaacagaatatacattcttctcagcaacacattgcacttattccaaaattgaccacatagttggaagtaaagcactcctcagcaaatgtaaaagaacagaaattatagcaaactgtctcttagaccacagtgcaatcaaactagaactcaggattaagaaactcactcaaaaccgctcaactacatggaaactgaacaacctgctcctgaatgactactgggtacataacgaaatgaaggcagaaataaagatgttctttgaaaccaacgagaacaaagacacaacatgccagaatctttgggacacacttaaagcagtgtaaagcagtgtgtagagggaaatttatagcaataaatgtccacaagaaaaagcagaaagatctaaaattgacaccctaacatcacaattaaaagaactagaaaagcaagagcaaacacattcaaaagctagcagaaggcaagaaataactaagatcagagcaaaactgaaggagatagagacacaaaaaacccttcaaaaaatcaatgaatccaggagctggttttttgaaaagatcaacaaaattgatagactgctagcaagactaataaagaaaaaaagagagaagaatcaaatagatgcaataaaaaatgataaagaggataccaccaccaatcccacagaaatacaaactaccgtcagagaatactataaacacctctacgcaaataaactagaaaatctagaagaaattgataaattccttgacacatacaccctcccaagactaaaccaggaagaagttgaatccctgaatagaccaataacaggctctgaaattgaggcaataattaatagcctaccaaccaaaaaaagtccaggaccagatggattcacagccaaattctaccagaggcacaaggaggaactggtaccattccttctgaaactattccaataaatagaaaaagaaggaatcctccctaactcattttatgaggccagcgtcatcctgataccaaagcctgacagagacacaacaaaaaaagagaattttagaccaatatccctgatgaacatcgatgcaaaaatcctcaataaaatactggcaaaccgaatccagcagcacatcaaaagcttatccaccatgatcaagtgggcttcatccctgggatgcaaggctggttcaacatacacaaatcaataaatgtaatccagcatataaacagaaccaaagacaaaaaccacatgatttttgtctcaatagatgcagaaaaggcccttgacaaaattcaacagcgcttcatgctaaaaactctcagtaaattaggtattgatgggacatatctcaaaataataagagctatttatgacaaacccacagccagtatcatactgaatgggcaaaaactggaagcattccctttgaaaactggcacaagacagggatgccctctctcaccactcctattcaacacagtgttggaagttctggccagggcaatcaggcaggagaaagaaataaagcatattcaattagaacaagaggaagtcaaattgtccctgtttgcagacgacatgattgtatatctagaaaaccccattgtctcagcccaaaatctccttaagctgataagcaacttcagcaaagtctcaggatacaaaatcaatgtgcaaaaatcacaaacattcttatacaccaataacagacaaacagagagccaaatcatgagtggactcccattcacaattgcttcaaagagaataaaatacctaggaatccaacttacaagggatgtgaaggacctctgcaaggacaactacaaaccactgctcaatgaaataaaagaggacacaaacaaatggaagaacattccgtgctcatggataggaagaatcaatattgtgaaaatggccatactgcccaaggtaatttatagatataatgccattcacatcaagctaccaatgactttcttcacagaattggaaaaaactactttaaagttcatatggaaccaaaaaagagcccacattgccaagacaatcctaagccaaaagaacaaagctggaggcatcacgctacctgacttgaaactatactacaaggctacagtaaccaaaacagcatggtactggtactaaaacagagatatagaccaataacagaacagagccctcagaaataataccacatatctacaaccatctgatctttgacaaacctgacaaaaacaagaaatggggaaaggattccctatttaataaatggtgctgggaaaactggctagccatatgtagaaagctgaaactggatcccttccttacaccttatacaaaaattaattcaagatggattaaagacttaaatattagatctaaaaccataaaaaccctagaagaaaacctaggcaataccattcagggcataggcatgggcaaggacttcatgtctaaaatgccaaaagcaatggcaacaaaaggcaaaattgacaaatgggatctaattaaactaaagagcttctgcacagcaaaagaaactaccatcagagtgaacaggcaacctacagaatgggagaaaatttttgcaatctactcatctgacaaggtctaatatccagaatctacaatgaactcaaacaaatttacaagaaaaaagaacaaacaaccccatcaaaaagtgggcaaaggatatgaacagacatttctcaaaagaagacatttatgcagccaatagacacatgaaagaatgctcatcatcactggccatctgagaaatgcaaatcaaaaccacaatgagataccatctcacaccaattagaatggcgatcattaaaaagtcaggaaaaaacaggtgctggagaggatgtgcactgttggcgggactgtaaactgattcaaccattggggaagacagtgtggcgattcctcaaggatctagaactagaaataccatttgactcagtcatcccattactgggtatatacccaaagcattataaatcatgatgctataaagacacatgcacatgtatgtttattgtggcactattcacaatagcaaaggtttggaaccaacccaaatgtccatcaatgatagactggattaagaaaatgtggcacatatacaccatggaatactatgcagccataaaaaacgatgagttcgtgtgctttttagggacatggatgaagctggaaaccatcattctcagcaaactatcgcagggacaaaaaaccaaagaccgcatgtcctcactcataggtgggaattgaacaatgagaacacttggacacaggaaggggaaggggaacatcacacactgtggcctgttgtggggtggggggaggggagagggatagcattaggagatatacctaatgtaaatgatgagttaatgggtgcagcacaccaacatggcacatgtattcatatgtaacaaacctgcacattgtgcacatgtaccctagaacttaaagtataaaaaaaaatgaaggaaggaaaacaaaaaacgcaaataaataaataaataaataaacagtttaggccgggcacagttgctcacacctgtaatcccagcactctgggaggccgaggtggccagatctcctgaggtcaagagttggagaccagcctggacaacatggcgaaacgctgtctctactaaaaaatacaaaaattagctgggcatggtgtcatgtgcctgtaatcccagctattcaggaggctgaggctggagaatcacttgaactctggaggtagaggttgcagtgagctgagatcatgccactgcactccagcttgggtgacagagcaggaatccatctcaaaaaattaaaatagaaaaataaaaataaaattaaaattaaaaataaacagtttaaacgtccaacactagtgacttggtaaaataaaatttagtacatccacataatgtaatgctattgtcaaatgaagttatttatggatatttgttgacatgaagaaatgtttgtgaatcataatatattagtcagttgaaagaaagttgctgacattataaactgatgtttggctaaattataagtacagatgcacgcatatagtactatgggtatataacagggttagtatatatatatggatatatgtgtatgtgtgtgtgtatatatatatatagtgtgtgtgtatatgtatatatatagtgtatatatatacacacatatatgtgtgtatatatagtgtatatatatagtgtatatatgtgtatatatagtgtatatatatacacacatatgtgtatatatatgtgtatatatatacacatatatgagtgtgtgtgtgtgtgtgtgtgtgtatatatatatatatgctttcttgctctgccagctgaaaagcaataacaccccagtagcaacaagcatggctaggtaccagaactagctttgtaatcccattttccaagaaaataaatcagagctctctggagaaatgtctgattctagggctgggacaaggaatatacaagataggtctggagaaagttacagtgccagaaagtaagcaagtgctcaaaaacaaaggaaaaaactcacaatgatgggagtatgtaaaaaggaggtaagagccaattggaaacgttccgtttggctaaagccaggacaattggagcaataaaataaagtagtactgagtaataatccaaggtgtaaaacaaatatcgtgtgtcaatactgatataaataaatgattgaataaataaatggggagaatagacaaatctcccatgcagaagaattccaaataatttacttggagcataaagtgatagaatgtaactccctcctcaagtgtgggccatacacagtgatgtccttccaaagagcacagtatggaaaggggtaagaaagagcaactttacagtggtaaaatctgacaaacatggcctcagtcaagtgatcaaggttgacgtcaacagtagtaagtcacgttgacagtatgaaccttgatatggtgtgaggagaaatggcatgctacctatggcgtcttcttcccaaaaatgtataacctcagtgtaatcatgaggacatcatcagacaaatcccaattgagggaaattctacaaaatactgaaagggagctctttaaactgttaaggtcatcaaaaacaaggaaactctgagaaattgttacaaccaaaaggagtctaaaaagacaggattaaatgtaatgtggtatcctggctagaattctggaacaaaaaaaaaattaggtaaaattgaagtaaatctaataaagtatgaactttagttaataacaatgtatcgatattggtccattaactatggcatgtgctgctgtaagaagttaataagaagccacactggatagggatttatgagaactctgtgtactctcttcacaacctgcccacaaatccaaactattccaaaattaaatttcttcttttaaaactaagtttcatatgacttgatttttgttaagggaggattacaattttatgtatagctgtgtcattatagatatagctatagacatggatatagatatatagatatatagaaatatagaaaagcatttagctgtgctgtctaatacacagccattacctagatatagctattgaacacttggattgtggctaatccaaattgagaagtgctgtaagtgtgaaatgtacaacagatttcaaagacgtaatatgaagaaaagaatataaacaatatcattaatgttgtgttttgagacagggtctcattcttttgtccaggctgaagtgaagtagtgcgatcacagatcactacagcctcgacctcccaggctcaagcaatcctcccacctcagtctcccaagtagatggaactaaaagtgtgcactgccacacctaatttttccatttttatttattttttatttctaggtttactcaaaaacattattactcaattcataaaatagtaattcagttagctggtgcctaaagactgaaaaaattgtaattttccaggcatttacagtttggggaacaaaaaacatgagacctacttgaaaaaatagaggctaataaataattaaggataaggctctaaaaaataacagtattgcaagctatttttaaagagaaaaatttgatagcaaaatgtttctctgactttgtaaatgcacaagaaagatcaacagttttatcacttgcagaaaaggcaattaatgtaatagaaaatgtgatgataaacttctaagaaactaagtgcttatgtctatttaacaatagaagttttacctattaccatttactattcatgtgtcgacagcaatccccttctctcccaactaggcctttcacaattatggaatatagacataaaatattattcctagatacattttacaaaataaaaatgagtaaatggaaaaaaggcaagttaaagtagttatatatatatattgaaaagtgggtgaataaactgaattactttcactaaaatgactatacaatagttaatgaatttcttatttatacaaggggaaaactggatataatatatctttaacattacacagtcatagaaaaatgttaactttaacctgataaaatcctttccccacatgttttacactttggattttctttcaatgtttattttggatccagagggtacatgttcatgtttgttacatggatgtattgcatggtgctgaggattggggtatggataatcccatcacccaggtagtgagcatagtacccaatgagtaaattgttaccccatgacccaccccaccctctaggagtccccaatgtctattattcccatctttttatccatatgtactcagtgtgtagctctcacttgtaggtgagaacatgtggtatttggttttccattcctgcatatattcacttaggatgataacctccagctgcatccatgttactgattttgttctttttaatggatgtgtagtattccatggtgtatatgtaccacttttttctatccagtgtaccattgatgggcccctaggttgattccatgtcttagctattgtgaacagtgctgcaataagcatatgagtacatgtctctttttggtataatggtttcttttccttggggcatgtacctaggaatgggactgctgggtggaatggtagttctgttacaaattatccaagcagagatctccagactgctttccacagtggctgaactaacttgcattcccaccaacagtgtataaacataccattttctatgtagccttaccagcagttgttatttcttgactttttaataatagccattctgactggtgtgagatggtatctcattgtggttttgatttgtgtttctcttatgattagcaatgatgagcattttttcacatgtttgttgactgcttgtatgtcttcttctaagaggtgtctgttcatgtcttttgcccatttcttaattggattgtttgggttttccttgctgatttgtttaagttatttttcctattcagatgccttttaatttctttctctagcctgattgctctggctaagacattcagtactgaatgttgaataggagtggcaagagtaggcacccttatcttgttccagttctcaaggggaatggttccagcttttaaacattgagtatattgctggctataagtttgtcatagatggctcttgttattttgaagtatgtaccttcaacgcttagttttttgaggatttttatcatgaagcaatgttggattttatcaaaagcttcttctgcatcaactgagatgacatatggttcttgtttttaattatgtttatgtggtgaatcacatttattatttatatatgttgaatgttgaaccaaccttgcagcccatcaataaagcctacttgatcatagcgaattaacttttttatgtcacgctggcttcggtttgctattaacagtattttttttttagatggagtctcactctgttggccaggctggagtgcagtgttgcaatctcagctcactacaacctcagcctcctgggttcaagagattctcctgcctcatggagtacagtggtgcaatctcagctcactacaacctctgcctcctgggttcaagcaattctcccacctcagcctcctgggtagctgggattacaggtgcacaccaccctgcatggctaacttttgtatttttaatagagacagggtttcaccatgttggccaggctagtctcgaacatctgacctcatatgatccacccatctcagcctcccaaagtgctgagattacaggtgtgagccacctcacccagccagcagtttgctagtattttgttcaggatttttgtgtctattttcatcagggatattggcccgaagttttctttttttgttatgtctctgccagattttgttatcaaattaatgctaccttcatagaatgagttaaggagaagcccttcctccttggttttttggaataacttcagtgggattggtaccagttctttatatatctggtagaattcaggggtgaatccatctaatcaagggctttttttgttggtggtggtggttttttttttattactaattcaattttggtacttgttattggtctattcaggctttcactttcttcctggttcaatcttgggagtttgtgtgtttccaggaatttatcgatttcctctaaattttctaatttgtgggcatagaggtgtttgtaatagtctctaaagatcttttgtatttctgtgggatgagctgtaatgtcatctttgtcatttctgattgcacttatttggatcttcacccttttacaaatttcttaatctacctagaagtttatcaatctttgtttattctttcagaaaatcaactctcagtttcattgttcttttgtatagattgtatgtctcaatttccttatgttcttctcagattttagttatttctattcttctgctagctttactgttggtttgttcttatttttccagttcctctaggtgcaatgttagattgtaaatttgggatatttctagcttcttgatgaagacgtttagcactagaaactttcctcttaacactgctttagccgcatcccaaagattttggtaagttgtatctcttattttcactaatttcaaagattttttaaatttctgtcttaatttcatttttcacccaagagttattcaggaaaaagttgtttgattttcatgtttatgtgtagttttaagagatcttcttggtattgatttctatttttattgcattgcaatctaagagtgtgctcggtatgattttgatttttttaaatttattgagactcgctttgcaaccaagcatgtggttgatcttagaatatgtacctgtgtggatgagaagaatgtctattctgtggttgttaggtggagcattctatagatgtctactaggtccaattggtttagtgtcacgtttaaatccagaatttctttatcagttttctgccttgatgatctgtctagtggtgtcagtaaggtgttaaaataccccactattagggtgtagctgtctacaccttgatcttttcatagatcaagaagaacttgttttatgaatttgggtgctccaatgatgagtgcttatatatatttaagatagctaagtattcttgtttaattgaaccttttatcattatgtaatgcccttctttatctttcctgaatgtttttggtttaaactctgttttatctgatataagaatagtgactcctgctcttttctgttctccatttgtgtggtacattttttcccatccctttactttgagcatgtgagtgtagttacacgtgagcttggtctcttgaagacatcagaaaattgggtcttgagtttttatctagcttgtcactctgtgtctattaagtggggcacttagaccattttacatactgaattagtattgatatgtgggattttaatcctgtcattgggttgataattggttgttttataaacttgattgtgtaattcctttatattgtctgtgagctatgtgcttagtatgtttttgtcataacaggtattaatctctcatttccatgtttagcattcccttaaggacttctcataaggttggtctggtggtaacaaattcccttagagtttccttctgtgttaaggattttacttcttcttcacttatgaagcttagtttggtgagatatgaaattcttggttggaatttatttgctttgaggatgctgaaaataggtctccaatttcttttggcttgtaaactttctgctgaaaagtctgctgatagtgttgtgggattccagttataagtgacctgacctttctctctagttgtctataatatttttccttttgcattgaccttggtgaatctgatgactatgtgccttggggatgatcatcttgtatagtattttgctgggttctctgtgtttcttgaatttgtatgtcaatctctctaacaagattggggaaattttcatagattatgtcctcaaatatgttttccaagttgcttactctctctctttctctctcaagaatgccaataaattgtagacttgatctctttacacaatcccatatctctcagaggttttgttctttttttaacattcttttttctttatttttttctgactgagttgatttaaagaacaagtcttcaaactctgagattctctactcagtttggtctattctgctgttaatgcttctgattgtatgtggaaactcttgtagtaaatttttcaattccaggagttcagtttagttctttcttaaaatggctattttgtctttcagctcttagatcattttaccggattctttggatttcttggattgcatttcaactttttcctggatctcagtgagcttctcaccatccaggttctaaattctatacctatcacttcagtcatttcagtctggttaagaaccattgctgggggctactgtgctcatttggaggtaaggagacatcctggctttttgaattgccagagttcttatgctgattctttctcatctgagagggctagtgtttctttaagttgagtatagtcagttggcttcatttctgggtgctttcagagggccaaggctctgtacaggatctttatttgtagctgaattcttgtcttaggtttcacaggcactgtacattggcaaaatattttggcagttgtaatttggactgtgatgcagtagatggtgtttaagagtgatgaccaacagataggctcttattcagccatgcagctcttttgtatttcaccatgttctcaatagtgctctgtggtggggtaaggcagagagataactccctcaccaggttcactcctgggccttggaggagccccctccaatcactggggtcatgcccaagtttcctttgttaggtgttctgggctgtggggctccctcagatagaggtcatggctggcagacaggccacttccttcccagaccagccctgtggagagaggcaccccactttcatgctggtccatgaaccagggcatctcaaccctctcagtgttttgagagtgagaacatttcccccactcaggcaccaccaagccagtgagtcttgcctatctaagtacagaaggaccatggaggtcgcatggtcagccatcagggtctccattttttgtggggacagaatcttactatggtgctcaggctgactgtatgttgaaatgacaatattttaggtatattgggttaagtgaaaataattttatatatttatttatgatttcctttaatgtagtcactaaacattgttaaattatatatgtggttcatattgtatttctactgatagcagttgtttaaaaggatagacatgagaatgttaacaatagctattcctagtagtaaagtgtaatttttagcttttcttttttctaatttttcttgaataaatatgtgttccttgtgtaattttaaaagtaataaaggtaaaaatacacaatgaactactgctgtgaaatataccactaacagaagtactaagcagaaatgtcaagtcttagagtcctaattatttattcatttaaatacatatatattaagtgtctcatgtgcaaggcatttggacagttgctaggaaaataaacacaaaaaaagatgagctataattattttcttcaaggggttcacagtccattttggaagttaggctcatgaatagaatattagagtacaatgcggtcagtgatactatggtgatttgtattaactctcctccccttctgctttaaatgttgctgtttttctggctctaaccttagtctacttctctgcccacaacacaattgcaactaacacctatatactaatggctatggctttaactttgactttgcttcagatctctacatccaactgtcttttggtcagatggccattgggcaacctaaactgtatgcctaaaacccatcatctcttcacctcccctgctccagactcttctacctccgtaattcttgtctttgttaatgatgccaccatttaaccagttgcctcatgactctgtaaaaaggaaatttagttactttacttcacttctcaaaattcttcaggcttggcagtgcacaagcctacatatgcccttagctaccaatccaacttcatctcctggaacacttctcatcagcattgacactctagaaataccaaactaccaaactcaggaaacatcacaagttatcacctctcttcctttcattgttgcgtgtgtccttccctctgcttgaagtgtccaacctcatcaccacctcttcttcatggttcctagacattcctctctgttacctcccttgatcttccaggcaaattaggctctcttctctctggctccccttgaactttgtacatacctccaacatagtgattttcccattatattataataccagctttctgtatgatactctattccctaaggacagagattgtatctcattaaccttggtatcctcagcgtcacacggaatgtgacagacagaaaactttcaagtttactgaatatttcctatctttctttaccttttccactctattgtggtcactcttaccctagaataatgtagatgttccttgaataccaaccaggcttcacttctgggtctttgttcttgaatggccttaccccagatggttccctctgataaaccaattagtcactgctcagaagtcacctcatcagagaggtttttccttcaatcctgtataatatagtgcctggcaagaaaaggatgccctctctcaccactcctattcaacatagtattggaagttctcaatcaggcaagagaaagaataaagggtattcaaacaggaaaagagtaagtcaaattgtctctgtttgcagatgacatgattgtatatttagaaaaccccatcgtctcagcccaaaatctccttaagctgataagcaacttcagcaaagactcaggatagaaaatcaatgtgcaaaaatcacaagaattcctatacaccaattatagacaaacagagagccaaatcatgagtgaactcccattcacaattgctacaaagagaataaaatacctaggaatacaacttacaagggatgtgaaggacctcttcaaggagaactacaaaccactgctcaaagaaataagagaggacacaaacaaatggaaaaacattccatgctcatggataggaagaatcaatatcataaaaatgaccatactgcccaaagtaatttatagattcaatgctattcccatcaagctaccattgactttcttcacagaattagaaaaaactactttaaatttcatatagaaccaaaacagagcccatatagccaagacaatcctaagcaaaaaaaaaaaaaaaaaaaaagaaacaaagctggaggcatcacactacctgacttcaaactacactacaagcccacagttaccaaaacagcatggtactggtacaaaaacagatatagagaccaatggaacagaacggaggcctcagaaataacaccacacatctgcaaacatctttgacaaacctgacaagaacaagcaatggggaaaggattccctatttaataaatggtgttgggaaaactggctagccatatgtagaaagctgaaactggaccccttccttacaacttatacaaaaattaactcaagatggattaaagacttaaatgtaagacctaaaaccataaaaccctagaagaaaacctaggcaataccattcaggacataggcatgggcaaagacttcatgactaaaacaccaaaagcaagggcaacagaagccaaaattgacaaatgggatctaactaagctaaagagcttctgcacagcaaaagaaactatcatcagagtgaacaggcaacctacagaatgggagaaagtttttgcaatctatccatctgacaaagggctaatatccagaatctacaaagaacttaaacaaatttacaagaaaaaaacaaccccatcaaaaagtggacgaaggatataaacagacacttttcaaaataagacatctatgcagccaacaaacatgaaaaaaagctcatcatcactggtcattagagaaatgcaaatcagccagagtgagataccatctcccacaagttagaatggtgatcattaaaaagtcaggaaacaacagatgctggagaggatgtggagaaacaggaatgcttttacactgttggtaggagtgtaaattagttcaaccattgtggaagacagtgtggcaactcctcaaggatctagaactagaagtaccatttgacccagcaatcccattactgggtatacacccaaaggattataaatcattctactataaagacacatgaacacatatgtgtattgtggcactattcacaatagcaaagatttggaaccaacccaaatgtccatccatgatagactggataaagaaaatttgcacatatacacgatggaatactgcgcagctataaaaaaggatgagctcatgtcctttgcagggacatgaatgaagctggaaaccatcattctcagcaaattatcacaagaacagaaaaccaaatactacatgttctcactcataagtgggagttgaacaaggagaacacatggacacagggagcggaacatcacacaccggggcctgtctgggggtcagtggactaggggagggatggcattaggagaaatacctaatgtaggtgacgggttgatgggtgcagcaaacaatcatggcacgtgtatacctatgtaacaaaactgcacgttctgcacacgtaccccagaacttaaagtatatatatatatatatatatatatatatatatatatatatatatatatatatatatatagtgtgtgtgtgtgtgtgtgtgtgtgtgtatttaaaaaaagatactttcctaattaaagatagtttcctaccttgaaaaatctctaatgccagctactaaagtaacaatttctcacttatccacaggggttatttctggccagtgagatgatgaatgactgttttatgttaatttttaattttatagtattctcatgggattaaaataattccgctaacctcaaaaaaaaaaaatcaggaaacaacagatgctggagagaatgtggagaaacaggaacagttttacactgttggtgggagtgtaaattagttcaaccattgtggaagacggtgtggcaattcttcaaggatctagaaccagaaataccatttgacccagtaatcccattattgggtagatatccaaaggattataaatcattgtactataaagacacatgcacgcgtaagtttattacagcactattcacaatagcaaagacttggaaccaactcaaatgcccatcagtgatagactggataaagataatgtgccatatatacatcatggaatactatgcagccataaaaaggaatgagttaatgtcctttgcagggacatggatgaagctggaaaccatcattctcagcaaactaacacaagaacagaaaaccaaacaccacatgttctcactcataagtgagagttgaacaatgagaatatattggcacacggagggaatatcacacaccagggcctgtcggggggttgggggctggggagggatagcattaggagaaatacctaatgtagacaaggggttgatgggtgcagcaaaccaccgtggcacacctatacctatgtaacaaacctgcatgttctgcacatgtatccaataacaaagtataatataaaaataaattaaaatgtatattttatatatattgaaattatttatatattttgaaatatattatatatatttatatataaatatatattatatatatttatatataaatatatattatatatatttatatataaaatatatattttatatattccaccagaatataagcatcaactgggatctaattaaactaaaaacttctgcacagccaaagaaataatcagcagagtaaacagacaacccacagagtgggagaaaatatttacaaactatgcatctgacaaaggactaacatccaaaatctacagggaactcaaacaaatcagcaagaaaaaacaaataattccaaccaaaagtgggttaaggacatgaatagacaattctcaaaagaagatatacaaatggccaacaaacatatgaaaaaaaatgctcaatataactaattatcagggaaatgcaaatcaaaaccataatgtgataccaccttactcctcctacaatatggctataatttttttaaaaatccaaaaatcaaagatgttggcatggatgtggtgaaagagaacaattttacactgttggtgggaatggaaacctatggaaaacagtgtggagattcctcaaagaactaaaagtagatctaccatttgatccagcaagcctgctcctcagtatctacccagaggaaaacaggtcattatacaaaaaatacacttgtgcatgcatgtttatagcagcacaattcacaactgcaaaaatatgggaccagcctaaatgcccatcaaccaacgagtggataaagaaaatgtatacacacatataccatggaatactactcagccataaaaaagaatgaaataatggcattcacagcaacctggatgaagctggagaccatcattctaagtgaattaactcaggaatggaaaaccaaatattgtatattctcacctataaaagtgggatttaagctatgaggatacaaaggcataaaaatgatataatggactctggagactcaggggagaacgggtgcaccaaaatctcagaaatcaccctaaagaatggacccatgtaacaaaaacctcttgttccccaaaaaattattgaactaaaataaaataaaagtcattttttataaaagaatctaagtatcaaaaagcccaggactttgtctgaattattcaacaaatgaataaagatctgatacatgtataaataagtaaatgatgttatttatcacctaaatatgacactgtctctctgactttaattttcctttcatctgcttatttttcttcccaagccatgaatatgggacaaaaaaaagggattaagacacaaacaccaagaattggcaagtataatgaggctgaacttgaaaaataacaatagttcaggtaaccatatattaaatttgtctcaagaatttattttattttctcattcatttattcaacaaatatttacatcacgcctattatgagttctttttgaaaatgcaataactgtctcttacatttgtaccattgtttatagtttacaaggtcctttctgatacttattttaacgtatcctcataaacaattctttgaggtaagcaggtcttatgaggaatgagtcttatgaggaatgagttaccagattaaggatcattgggttgtaaaaatcttgagctagaaagcattccatcgttttattgttgatacaactatatacagaagcccattatcaatctatttatttcaccacagagagctataatacacccattgaccatcagtaccagtatattaattttcacttctgggatttccagcctactcttagcttcaatgttagtgtgaatatttcatggtagaatgcacaaactttgaggaaggtgcaatgctttccctgtttcttccacttatgttcaggttctgcacatactgtatgttctccataaatatttattggtgaagagaacagttattaatgtaagaatctctctattcagaaaatatccaaggaaactgtgatagctgctggtttccaaagatggtcttccaatgaactatgtctctcagtattcggaattttgcataattccttccccttgatctggactggctctgtgacttggttataaccaacagaacatggtggtgggttaagcaatactcatttcatagggggcatttctggtcacatgatacttaatggtccatggtcaaatactaggatccagcaaagagccaagagctgtttctcaaaaaaaaaaaaaaaaaaaaagaaaaagaaaaagaaaaaaaaagaaaaaagaaaaaaaaagttatctgcagagtatggcatggctttgctcccagattctaaaagtctgttctggaatttacctaagaggcctgccaaaagctcagtaggcactttaagcaccactgaatcagatgtgtcatatgaccaaagtggcagggaagcttgccaccctctcacaagggcttgtctttcgccaggccttattcaaaactggaagcctttcagattactcattcagcaaataggtttagactataacaacacacccaaataagatatgttgcctccaaaatccaatgaggcacaccagaaattgggactctttctttatggtaggagagaccagatgtagcattgaacttcaccttgaaagagatatctcaactttccccagaccatgaaaccccaagaaagttcctgaaggagcaaacttctaaatttttctgggatttatttcacaacctcttgcctctatgggtcttaccaaggtgtctaaagtagttgcgatttcctggtccaccagtgtagaggatccatgtggtgtgttgtgaaatgaagaggcaatcaatttcctgtggaatagaataggccagggttggagagttgatataaccctgaggtgaaacaaggagggtaccttgtttcacccttccagatgaaagaaaaatgcttctgatagtctctactaacatgtatatagaggaaaaaatgacttcccatatcagtattcatatattagatgtacatatattgatttactatagcaatgaaaccacatctggaacagcagctgtgattgtactcaccacctgattaagtttacaataatcctttgtcattcttcaagatccatctgtcttctgcacaggccagatagttgagttgaatggaggtgtggtgaaaatcaccagccctgcatcttttaaatcttttatagaggcactaatctctacaagtctctacagaatgcagtgctgctgtggatttactagtttggaatacaaaggcagttctaatgccttctacttgtcctcactcctcagatcagataatcaatgtagttattctgcctttcctgagtgtgcctccttcagttaagcattctagaacttgggaaataaccatggggtaagttcagagctaactggatgcaatatgagatggacctgagccaaaataccattaatcattcagcttcaataaacccctactctggtaaataggcaatagtagcatattgtgtctccaaggactggtatcatttcagagccaatgtccagaaatcccccaaaggtctggttatttacccttcccaaatgcactatgaccttggcaaatggctttaggtcttttcagggaaggaaagaaagagaaattacagtctaaacttttggaatgtaaatataaattagaaaaaatcctgcagtccttttggcaggcagggtacctcatcattttgttcctgccctgatatgggttgccaggagttgagtctagctataggcatacaaacagtgaaagatgttgggggtgagtcttgaggggtctcagcaattttccacagagtaagtccttacagccttttcaatcaagggaggactaaactcctcagagggaaaggctgcttctgctgggaaaggagacagggctttcaaggttctcagcttccaaagaatctgcctacatgttgccatctcaattttcaggggaggaaagaaggagaaattacagtctaaacttttggaatgtaaatataaattagaaaaatcctgcagcccttttggcaggcatggtacctcatcattttgttcctgccctgatacagcctgccagctctgtcccaatcaaagccctaattttaactgtaagaccttcaattgaattgatgttctaatctagctagctgcaggatcagtctttgggcttggttttttgaaatatcagatcttgcagctatgagagataagagtttctttcagagtagtcacaaagacttttcagtcccttgcctgcatcttgaactgaacattcaacactctgagtttatttctttttctccatattctctgtgacactttgaagcaacccacaaactccagtcctcatactccttacttccactacattggtctatggcagcatctacctggtaatctaacaccttgccttctataagcacttgatatcaaggactactgtgtcccatttaccattggcagtatagtcactaatgcttcatcgaatcagagaatcaacaccaaattcccatccttaaaattctatctctggattcacttccaacaccaatagttgtatcagttaagagtcagtcagggaagcagaaccactgtgaatgatacagaatataggaatagtggattcgttgtggaatcagaccttacaaatgtgagagaagctagagaaggaaaggtctggaagaaggagtcagaagatcagaaaaagggtcattaacctgtctatcttatgcagtagcacagatggaccagacaggctggggcttgggggaaatctaggaagctaaacactttcaaccaccaaagtgggactgtgaaggggagctcatgaagaactgtatggagagtggttacctgtctgtagcaaccacttctgtgggtccacagccaagtagttggtgatgggtctcgagtcactgttgttcagcagagccaagagtcagaaagattcgctggatgcagagtgaaggaaagcaaggactatatgggacctaccaagcatctctccctctgtccatcactgtatgtgaccacagtgacttcctaagagtaatagttaccacttctgtgttctaactcttttcccatttcatctcttagccaatgctaatacagagcgatacatgaaaggggattctgagaaatgcagttgtctgcttaagcaagttgaccagcataatccagcacaacttctaaatctcagaagatagcaaatgtgggcagaaagaaaagtacagatgctccacgggttcactggtgatctttatggctgcaactgacctaggatttgggagatgcttggagagggacagaggggcacacaggaactttcctctcaaatatgaggatatcaatctagatctacgaggagtccttttggagataaaaagaaatttataggagatgatgaacaaaaggcccaatttctatattagactgtctccctgaatgagggtgaataccaagaggagactgagccaaggcctcagccctctgaattctaaaatgtagagaatttcattctgatctattttatacaaatggtgctggtctctcagacagtaccttttccgatgaaagaaagagagaaacgaagtagaagattcgtaacccagctcagtaaagaggcttacctttgctctttgctcaccatcattcccccgctcaaagtctcagctacctgcctctgtgcaatagctacacagtgctcctcaagtatctgcctcctgaacacagaattataactaacaagtatttaaaatttatgtatttggtgcacatctttcagtatgagctttttggcaccaactcttactgaatgccaatataaaagtaaacaatttgaaattattttaagtgattatcaaaaataacagcataaattctatgatgtggacttcagccacagtcccttccagggactcttccaggcagaccaaaagagaaaagctgtctgcaaaagaaactcaaagttcccaggaccaatagcatacttgagtcagatacagctccttaaaagacaagtaattttcagaggccctagggtaaactaaattagttttaacataatactatttaaacatgtagaaacataatatgatttataaactctatatgcttattgctcttatgccaacaatttaaaaatataaattaaacattcacaaagcttcaaaaccactacaacttcaataaataattttaatttaatgtaatgataatacttggctaaaactaaatcaccaggtttttttctttccaccttttatattaggtttaggtggtacaggtgcaggtttgtggaatgggtaaatatatgtcatgggggtttgacaagatacagattatttcgtcacccaagtaataagcatagtacccaataggtaatttttcaatcttcactctcctcctaccttccaccctcaactgggccctggtgtctattgttcccttctttgtgtccatgtgtactcaatgtttaactcccacttataagtaagaacatgcagcctttggttttctgttcctgcattaattcacttaggataagaacttccagctccatccatgttgctgcaaaggatgtgacttttttcttttttatggctgagtagtatttcatggtgtatatgtaccacatttcctttatccagttcatcatttaagtcaccagttttgagtttaatagatgaaagatatatacgtggtgctgggttttgcttattaacttgattcttctcattttgtacataattttcatgcttgttttcctttgtttgaaacaaattcatattgaattgttaattaattcacttgatgggccaatcaatttactgtgcaccaatagtacaatactgaaagaaatatttttaacttttaatgaagcattctttactattgctaatcaactgtagtacagtgatttatacaaaagatgagctctacacagtacagccatgtgaatggggaatttagcaccaatcattcattgagttccccatgcttacagcatctaacttgttatgattctattttccaatgactgttttatattcaaattacttgacattattaggccttcacttagtattaaagtaactattagtattagcaaagcagggcatcaaaatattgtgacagtgtttgcttatagttgttcagccccaacgtgagttagttgtgttttatgaggggtatgtactccttataattttgcataatttaaggcttatgtttccgtggggaactggttcacagagcccaaatacctacaactttgtagcacatttctgttttaatgccgctctttattttcttagcattatctaccatatttagcaactgctcttttctaaattagtggtaaaacacatcaagggagttgtttggctttttctgtgggagtgaattatagctaacatctgtgaaaagttatgtatctgaatgcacattttccagcatgagctttagtaccaactcctaatgaatgctactataaaaagaagtaaaacaatttgaaattatttaagtgattattaaacataatagcataaaataaccaagatctcttatagaaattctcataaagcaacaggtggaacataccatactaacaatggctggttctttccattaaagctgaagtagctccaccatgtggcaggagtaaaaacaatctacgattcctttagcttgttcaccaactgaaattacacaaatctcatttaagtttgatgagaaccacaaaattacccattcttctcagaatatatgggctattaatttttatatcacattacttaaatttcacataatttatgctgcccaactacatgttttagactaccattccattgaaaacacatttttaactccataaaattatgaagacccatgaaaattctagagatgcatatattccaagtataataaatatcacaaataacttttaaattcaatttttaaataattcttgttactattataatttccatacaggtctcagaagcatcttaaaagtaatgataactttttgtctctgtaaaaagaatactattcaaaaaaggacaaaaagttcataaatgtggaatactaactttgtaactaatatataaaatacatgagttttttgattcctaaattcttccaacagaaattcaaataatgtaaaatattggtatctttaagccgtaacttattaccttgttaatttcaaaacagcatactagtaacctgatctttaacattagttgttaccaaattatagtttttaaaaaatttcctaggaaagtacgccattttttgggtatcgaacatctcacctcataggaatacggggattgttttccttccactcttttgtattttccaaattttcaatgtaataagcacatattaattttatgatgaaatgaaatttgtaaaagaataaatgttaacattagaagataattaacaagttatctatctcgagtcaatatacaatacaaggaaattaatataccactttacctggtggcaaggaaaataggtgagatatctttcccatcacaacataaaaatatatgttagtaaatattcatattggaaggaatgtattctatgacctagcaattacctgcgtcccagtcttggcattactcttattgtaaaagaaagcatgaacaagcagcaattttggggccataacaagttggaaataacataatcatatagtaaaaagtgatatcacaggttataataagtctatgttccatatattaaaaataatgacacgaatctacatataatgaaaagagaagattgccaaaatgcattattgattgagaatgcaagttgcagaataatatatacagtattatgctatttatgttgataaaaatattgtacagtataaaccctaaatattgcacagcaaaaggactgtaagtacattgatgaattccctgttattagtacctgtggaagagggaattatattgtgggatgggagaacagtcagtggagagtttggttttaattgcaatgcttttatttttataataaggatgtattagcatattacttgcataattaaactttgttttttaggttttcttcttcaccatcgtatatttgcatgcatatacctatgcaaataacaaagtccacctttattggggatttgtgactggcatttttctaagcactttgtcatgtgtcatatattgtatcatgtaaacttattattaaccttatgatgctaataatatttttcccatttcacagatgacgaaaccaagcctcagaggaactgagtacattgcccaaattcaccaagcccgtaagggttacaatcaaactttgaatccagatatctgtctcagagtccacaatcttaaccaaaattttttttacaaattcccatgtagaagtgtgtacatccacatacagacgtgcacacacacacatccctgctgtccagccttttctccccctgacacttgagtgcacaggtcattggcatcttctctccataactttccaccattgacagaaatgtgtttgctcaagggatgaattgaggtgaaaaccttacaacattagctcttttgtaaaaaatctgagcagattttttattttgtattttgttttcctggttacgcctctccttttaaagttttgaaaggtggcattaatatctatttctttcctgactgctccatttattagtttcattaggattagtgaattctacttggtctttccccaatccattaatattttttcccttcacttaaaaacaaacaaacaaaaaaaaaaaacacttgttttccaaatggctttggggtggtagtaggatttcctgatggctagaggaaactcctcatggcagtatcttggttgagtaattggtcctcgtctgtatgttcaagaaggtgaatgttcttagtaaacccagaggggatcagcccatcagaggtaagcttctgctatgtaaattgagacgagattcaggcttaacctcaaataccaatgcatttgctcttctggtctctcccttctcctccttattatcatgatactttaaaagccaaattactgataagaaatttgcttgctgagaacatagaaaggtaaacggctcgagagagggggttgtacatttttctttaaatctaaaaaaccactatgaagaatcccaacctcccaacaaaaattgcctctctgttaactggattttacctgcatccagttttaacacctctctcctctggacagtgctgacactgtcctcctgggaattatgacttccttagacacataatgctagagtcaagttggaacttagattctttttcttgcggaagtgggaggcattgtgtcttctcccttcatgcattaatttaattagaaaaacattcactgtctctcactatcagcctacagattctctatcttctcagcccggtaagagccttatcacactgagataaatggttctctttgttgtaccaaggtggttcctgaagcatggtaatggggaggagacacctagagatcaaagcaactaatacaatcaactccaatccagccccaaaccaagtctttccaccagctattcctttcatatctaaatgttgtcctcttcctctgcagcaggatagaaaatcaatttctaagtgtaaaggcagtaaacaaaatttcagagatatatagtatatgtaagtttgagtgcataaagttaaaagattcccaaatatctaaaaatgtttgaattaaaaaatcagtatcaaattagtaaaaaaaaaaaaaattaaaaaggtacgtgagctgtataacagtcaaatgttaatatgcttaatatattaaaagtgtatataaaaggataaggacaacactagcctgatggatatataggcaaaattcggatacaaaaattgtgtataaattactaatgaatatttgaaaaaaaacactgaaaattttaaaatgcaatgaagacagctataattcatatcaagttaacaactatttttaaacaatcacaatctaatgctgatgaaattcggcatattaagagcaattacatttttactgctatgattgcaaattgatacagtataacagtagattatttggcattaggtatcaacagcttttaaaatagtcatcctcttgacccaaatattggaaatctatcattaaaagggtcttctgagcagattttatataaggaaaatgttcattaaatatttttcatactttcacgtaatttgaaataacataactatccaacactagagaaacagttaagcaaattgagcaacatctacccagtagaatactatgccaccattaaaaattagattttcaagagttttaaattacatgggggaaaataaagttaacagaaaattgaatgtacaaaacggcctcaacaatgtcagaaaatatacttaagaccaaagactaaaaggaaatatgccaaaatgatgtagttattgtctctgggtagtgagataatagattatttccttcttcctcttctttttataattgtatgtaaaccacaatttcttcttcaatgaaaacatatttttataatgagaaaaaatgatctaataacagtatcttttaaatacaaggttatgtgccctgaaaacattcctagtttcccttaaagtcatttgtctaacataagtgaatttgtctgaatctctctagaatacacattcatatgctctaccccaggagcaaggagttcctaaaatctactccctactatgtaaaataaaactgcctttaattttttcctgaatttgtttcagacttcaagtagagttctttattatttctgttcaacagcacaaactacaaacataatctgtttggcaaaccatttttattcaaaagtataataatgccttgtttttcatccttccagaggacctagtggaagaaaatgcctaacatcagggaacagtaggagcagcctaaattgaccacagaattgtatttggccactgtcctcaaaaaattcaagtggattcagtaatcctgaatacttatgtacaacaagcattcctactataatagatcatgaggattaaaatgaggtgagttcattggtgagcatgacatgtagccatagcaattaatcttaggttccttctcccttaaaaatggctaataaaacagaagaaatgctgtatgaataatttcagaataacatggaataattgtagatatttctataagatttgtaccagatccactagaacaaatctaccagtagctaaacactgtagagtctctaaaaatggacaaggaggagatgtgacaaagatactctttaggggaataaagtcatcctaaaaactgaagatattttctgctctgccaatcaaggaatcactgttctttccccagcaagaaggagagtgaaaagaggaccaaattggaggccccaaatttgcattttaatcataacctttcatagctaattatgagatttgagcattctctggatctcagtttgccacccataaaatgatgggtggactgaaagatttctaagttttccagttctgacattgcatgggtctataaggagctccatcttggttggcccctgaaggcacctggagactttggttttagggaaccaaggagtctcagtgctgaatgaggatatagttccccggtgtagaattttagaaactatgcaagcacttggatctttaaaaaaaaaatagttggtccctgggctgtctcttacaactttaatatttacactatgacaaagtgaaagtgctcattcgtgttcgagccaaagtaataccattctctttattcattccaatgagctaattttacatgagcaagaaagcactggagaggtacagacccatgggatatttgcctagcctaagtgagtctcagatggaaataaatatgaaaagcgttagcatgggacctgtgagaaattgattcttacatctggcctccaaagggtcaagccacaaataagtgacctttgacatgccccttctctagttcagcctggagctgcccacatttcccagtggtgcccagtcaactcattctcctgatgcaggatcatcagagagaatctggagtaatggcagctgcgggtaaggggctgccaaataatagtggaacaaagatctcttccaagtttctatttcctccgaatagctcaaatacttcaacagtccaggtccccctaaagactgcattttcttagctgcattctctctagttgtgatgagtgtctcaaaaaggaacacctctcctcctgagtttatgatagtttatgacctgccacttcatttccagcagtgtgtcccagttcctcttgcaatccacaaaggacactttttctttcagtagcctggtgtgagctcttgcctctcaggattagctgtgatcttactgctggggtgggagcacacttagccacagggcccaaaagaaatactgtcactgaaaagagcactttcctgtatttgagggctcttcctctcttctggtacacccggggaaaaacctggcagagtccacccacagtctttgaggattaattctgtaagaacttcttacactgaagggaatcctcctccaggggatgattctgctctgtgcttctgagctctgatggcaatcacatcaacatcgctggggactgtggcagaagaggaacatcacccactggaaaccggggcaagttgctcctctgtagttccaggaaatggccagaggcacagctctgctgttccaatttgcagttttctctaacatcaaaaataaaatgtgatttgcatttgaaattttacagaattcctcattttaggtcaagactggccttacccataggttagtgacttatgtggtaggatttaacacacacacacacatacacacacaaatattatccataaaaagaattatattcccaccaacctgctgtggcattcatcagtgaccctttgaagttcagccattgaaggggcaggttaaaatgcaaatttgtttcttggagaggtagcacatagagctattatcaactgttaatgctccggtattgctggaatgtcagactaagaagtttgggttaaaaattaacatatcagtaagtgaagactggctttatatattacatatttaatttataaaaatggtgacattaaaaggtggcaccaaaatgtaaatagaatcaagatcactttggataaattaacgcatgacacaagcctttgacatgttattaatggaaatgagtttgggggatctaatttagcctttgagattagtgtcaacaaagaaaggtatctcctctggtgcccatggcagaagcagaacattagtacaattcaccatagatcagtttcactttgtaattcagtgtaagtggtttatatgatagagagggcaggaagatctggttttgactctgtctctactacttacaagatgcatgaagctgctcaagtcacttaagcaaggtgagcctcaggttcttcatctacaaaagtgggatgtagaaaagaagagtaaatgtaaaattcctgttcagtagttgtctattaaagaatctctccttccttcctctattcacatccatcagggagaggagtaggctgatggtgccagctaaggacctcggcactcctagacctattcctgaaccattaatggctctgaatttgggacaggaatgttactctcatggttaattccttgctcacttgtctgctggtgcttgttcacaatgtcaaagatatggcaacttcatgggaaggcaggtttaactttttggtgtttttgcactagcctgtatatctgtctacctttcatttgagaaccaccttgctgattcagactggaagcttcaagagagaagtttctttccatttaatgcactggggatggtgctcaacagagaaccacactcaaatcggggctaaataatatggcaatatcatggttgcaaaagaaacacctccctttctcaccaaatcactgaatcccttattctataaaaatgaaattgaactgcaaacatcaccaccatgacaagaggatttaggcacactgatcaactgattaaattctatttgtcatccagagtgatcctggaggccttcagagcctggaggaaacctctctgtgactctactcacatctttacacacggaaaatccaattaggctgagtatctacagcagcttccagaagtaaactgattgcagaagggcagcctgctgcctgaggactgcaggggacgaggaaggggtgggccacctggaagggacctctgccttctcagcacctagagttggtttccagatgatcacatagtttaacccttttcttttatagacaaggaaattgaggcccagaaaggttaacagtcttgcccaagacctaagattagaaggcagagtcggggttgagaattgcttatgtgagactcagacccaaagcagacgaccatattttcaaattcagtgaaaactggaaaactcgtatgggcctacccagcccggaaaatccccatgtattaccaatacatagtaaacgaatcaaagattgaaaagtttacttgaaaaccaatcagaagtcctctcccacatgcaaaaatcccaccctaatagaacactcatcacccgtcagactgtcttaacacttcttcctttttctttctttgcaaacccctttgagcctgtgccagaagtgacggtgcctgccaccctctctgcagtcagtcctgaccagttctctggggtttacacctgtcctctggccactcgtcagctgcacttcctgcatctgcttgtttcaccttggccccagctttacctgaggggtgcttggcctgtgccttgagttccagggcctatgtttacttcaaaaatattaatgtcaattccttcaacttgttccaaagacaacagagcctctcacaagcaggcaagccctgccacttgttacgtagttgaggctgaggagcctgcaggtcccagccaactttatcacctccctcttctgaggggtggaagtccccaacatctcagggtcccctgagagtatggggattcccacatcggcaagtacctgcttcagagaagcccatgagaaactggcccagagcaagcgggtccaccctcccattgtgggaaagtgaagggcagaaggagtctggctggaggtcactcctgccactgatcttcctcactcgggtccagcctgtcagaggataaagcacagtggtgggtgggggtatctggctctcccccaccctccttctcaggggttcagtagtccctgggaacaagattcagctcaggaatttctgggatgctggtcagttctggccctaaggacactgggagtgacagcgggctgctaaggatgtgacagtgactgggctgttcccttcacatgactaccagggcaagccctggccaaatcccagcacctgctgaaagttgaagctgaccactggagtgattagattcatgacatgtggtggaggcctggggagtggagctactgggaaaggacacagctaaggaatctcctccctcccagcattgcttgaccctttcacaaagacagtggtaggtagaggaagaaggagaattggcctactccttccttttcgctgtatatggtcatagaaattgtcagaactttatatctagattcaagttctatctctagcacaattagctctaaaactttgcgaacgttacttaacctcctaggtcctctttgttcataaaacgagaacgtaatacataccttggttggctgtgaaagttatatgagtcagtgttgtggggaagttgaaggcatgcagtagatgcacaaggaaaattaaattccgttccccagttcctggcttgcaagttgggggttaaactcagttaagctcagagaagacatgacatgacgggggatcaagggagatgtgggaagctcacgggctgtggttcccactgatccacattagactccaaatgacaacaccctcacaatcccatgaaattgagcagaatttctcttctttcttgtgatgtttccagaaatgaagagagagggaaggaagacacagactctgatctttggcttcactttggttccaagacctggagctgatagtgtatggagggttgcctgtttgtccaggcactatgaataagaccaaggtaatccagcccaactctacgacacagctaagccaacaagcagctggatcttgtgtctcagcactcacagaaatgtataaatcatctgataccaactgctccccggaagcctctgtctccagaatataaatgtccaactacaggactggcaaagaaaccaagccctgggcaatgcctactatggacccttatttcttgtggtttgctaagaaaaaagtaggcccaagggagaggagggggaaaaccaggagggtctaaagttcttctgactgaaagaaaagaccacatcagagagaaagaaaggaatcagttaagtaataaaaggttgtgagttgatttatcattcaactaaacaaattatcttcctacacaaacattctgaggattaagtgaacaatataatacttttctgagctctttttgatcaaatgctttgctgttaaaggttatattcctagggagttgatactgaagcttcttgttccttgtcagtaaacacaaggagaggccaaccctctgtaaatttaaattacataaaacctttccccaaactgtctggtctcctaacagccccttttcactgaactctgtggttatggaatgtaagtatctttatcacagcagcacagacttttgaaaatttgacataatagaatttcttcctcacaaggcatatcaaacaccattgcaaactagtgggatttttaatcaagactaaagcagaggtcttttatttgtttgtttgtgcttagattatttccacatgaccaataaaatgttctctctgaccatcatccctgctgactagaagtaccaggaaccttgtctcaccctcacctccagaggtaagggtatgaacggactgtgaaaaaacacagcagaacactggggtcagcagagagaaagcgaaagaaccccatgggcagataatctaaaagcagcagagaatcaacgggaaactaacacaagtgcctgaagatggagacagcaatttttagtgattttggcttgtctctgttctatgaagctccaactcagtggcaacctagtgtgaaaatttatgaaatacttttggatttatctctgtaattccaggtctggcacaatataggtttcttgaatgaataaatggatgaacatgtcaatcaatgaatgaacagtaatattaaggaggggaagaaaaccattacaggtcaatgaatgggttcctagaagattcccctgtctcccattgtcttccgactcagggagacaacagctggagcagagtgcctagacttcgggggcttaggaggccacacatcttagagagcatttcaccatcaactgcaattcctttggcagtttgaattataatatttacttccatgatacagtcttcagctgttgtaactgctagtgacccttctctgaatccctacttcgtatgttagacattttttatatggagaattaatacagccttgactgctatgcttcttttttacttccatctctaataataagatcctcaagggtcgagactgtcatactcttgttttttgtgtttacttcactgcatatcctagagctgagtacatatggaagaatgaatcaattgatgaaatttatgaacacatgctgaggtttaaagagaatatcaactgcttggtttgatgacaaaaagcaacatcactctgtgtctagcacgtagcccagaggtgcgggccccatcctctcgtgtgaggagcccacggtgatgcataggcacctgcaccccgtgcctaaaccctgcagctggcacgggccctgtctgctcttcattcaccgttctcacgagttgcaataagttcagccctccatgtcacactgtgttttccatcctggggagtgtttcacagctatcccaagccccacgctgacgaatcacggccgaaaacacactctgatgccagcacagaccacggagcaaatgtcagacaagatcagcctcggaaaagtgagtcctgaattgcgatggaagtgggcttcctctcacaaggactttgtgtggagatgcgcaggtgggctgttggaaaagacccatggaattcccttcctctgggtgccttttctgtcccaacctctggggattcctcaagaatcggggggatttcagcacggagtgtgggactctgtctgccccaagatcagaggattcaccttggcttttggaaagaactgcccagtgtatcaggtttttatgagtcagttttagagttgggaatgcggacagatttgtaagaaagtccacagagcatatctctccacagcggagaaggctctcgagccccagaaggcaatatcacggtggcctaggtggatgtcacggggtgagaatcaaccctcagttgccacgaggaatctgaggagatccaggattacggtttttatgtaactgtcttacctctgtttcacaagggccaaaacttcagccccgttataaaatcaacagatgcagaaaagagacaagtggccactagatggcagcagatggtaagaaacgtgagttgcaggcgggctgggcaagagttaggctggaagcccctccattttgctttacatctttaatgagatatgtgaagaaaattagtcccttacatgccagacgcagatgccacagcatatggagagatgccgcacagcaatatttctctggttattaaacaggaggcacctaaccagtcattcactgcatcatcatgcagagttatcctttaggtctccggatactgttgttgacaaggtaataacagaagaaagcagttgagaagactgatgtcgggacgtgggcctctgggctcgtgggacttcaccatgccaggggatggggcacattgccagaaaatgaggagcagcccactggggccacttttccgtggccagggggacactgtggcttctgctgccaggcttagtcccagcaggcgtctgctgctctctggtccccctggcagccctcgggggctcatttattcagaagccccattaccgcgagacaattctgcggtctgacctttcaccacaaatcccaaatgggaaagggagctctgggaattttaaagagcaaaccacacttgcttctccagcaaaattgaaaagatacagcataactagagtgcattcaggtgcacatagatagggaaacacggtttccatgctgccccaaacaaaaggagggagtccagtcctgccgactgcaggaaacagcctcactcggaagacacactttttcttgggagagtgttcccaggtccagagcaggcagggattgcgcccacttccccacttctcacacttttctccaaccccaccactcagtctgactattcctttatttaattcttccacactcccaaacccaggggcttcataaggccttcagggtagctgaggaacagagaacagattattcagtccaggcaactagtccctgtctcaggcccaacaagaaactgttatcttattaacctgaaagcccagaactctcaggacttctcagagtcactcatgaagccccttaacagtcctgaaatgaagataaataatacagccatttttcgtacagagaaactgaggtataaaactgagatcagctgcagctctcctggtccccattgctttcccacagattcaaccctctgaagcatcctccagtgaaaatgtagtagcaagattcaccctaccaggatttctctccccctcttagaaaattacttcctgcgctagaaatcctcacttgtctgtgtgactttagacaactcgcttaacctctctgtgcctcacttatcatctgtaatttgagggactagaaccagatgatgactaaggcccattccagctcacagtcttgtggctaatttcccagtcctctgccagccctcaaagagagtcgtatgggacactttttccagcaacagccaaactcaacaggagcaagcagaatttccttctccaattgagaagcaatggggtggtggttggagtcttgttgatgtcctttgtccttggagtgaggcaaacagtgaggcttcagatgttattggcactaacagcagggcctggaggtggccacactcttgtggaaggaccatgcagagctgtccctgtgggcagtgtaggtgcatagccaagactgagggatgttttaataactacttctcaataagaagacctattttattctgcacaggggtgtggacccaatccaggtctcccaggaggaatctactctcacccataataggggattggttcagctcagctgcgctcacaaagggctatacagcatgcagcagtacaggcagctccccgcagctccatgtgaaaatgactcacagcagttatgaacatcaaacctcctttgatgtgttcccagacatgaagaacagccacgggaggaggagacggactctggttgctagctctgtggggtggcgcacagagggcctggacacatctggtaccatcctgaagctccaggagaaattcaggctgggtaattacctaggacttcctaggataacagagcttcctttcatctatctctctccctccctctcactgtctttctgtctccagctacaagggaattagattctccaaggaattacaacctgtttctgtaccttcacctttcccgaggagataacaattcacatccctgaataaaagttgttttattgagcacaaaatgaatgcacccccctcgctcagcatctgtgccaattgccttaaagctatagacctggcctccatcagccaagtgaaaggattttcctctgtcatggccatttccagactctcagccttttgagtagccacatggtaccttgtcctcctaataggctctcaatgatgattgaatacaaaggctctaattctctgttgcattggcagctcccaagactgggtcgatcacaatcgtccacagcagaagacagcggtgctgacggtcaaatgagcatcagggcacacagcagaaggggagggtcagccactgtcccttcatgcccatttcaacagaaagcttatttatatgcaagaggtgttccccttccagacagggttcaagagcacattggtccctggaaacttgagcaaagtcttcacggttatagaagggagtggcaaaggacatgtaggagagaatcagttccaccccatgcctgcacatttcattttctgaaatgaaaagctctcatacactcacagagatctgcacatacccacacatggaaatagcataaacagctactctttactgagcagtgaccacgtgtcaggcacaatgcctcgggcttcacatgcatcatctctaatcctcatcgacgttctgggtgtgggagtgagggcatccctgttttatggatgaggaacctaaggtcagaaaggctaagaaactttcttaagattgaacaactatggtagaagagctacaattctagatggttggattccaaagcatcatctcttaaccactgtactatggggcaatatgcttataagcaagtgcttactctgttggaggcactggggttatgagatagtgcaggaaagacatagttattcacttcgcaaagcttcatttttaccgcacactcatgcacacagtgctacacacacacatgcagagttactataactgtggtgtcttccaagagccctgtcactaaggtatcctcagtgtcgtactctcagtcctcctgcacttgaaccacagtttgaattgtgcatagggtaaagactgaggtcttctacagaaaggcctaagctgcttgaactttacagacaattatgtgagcaattcaaccttttatacattatgctgtagttacccagctcctgaactagtcatcaggtattttatttgttttttaacgtgatcaggaagtttctctgactcatttctctatctttgcagaggaacaaggtaggagagcaacaggggcaggaacagagaggatgtcaagcttgatgaaggttcagtaagtcaagtcataggtcaactagaagaaataaagcaggggaagatttggggtggggctgaagctccattgtttccatgacaccataagataagtggtgatctaggtgatctaggtgtgcaaaggtgaaacaaaacgaaagacgcaaacattgtactagtttcaggttttgccaagagcagattggctgccaaggctacttcagccttgactcatatagatccatgatctgggaggcaagacagcgtcctgctgtgctggacatctcagtgacattgacccaactgggggaactccctgaggttaagaaaacctccctccaaggctgagttaatgaactacctagatgtaagacaggagactgaaaccatttaagtcccaggaaaaatgcagacttaccttcttatgacctagatctctttgcaaatctaatgaaaaaggtttgttatgcacaaatgtttccctccaattttatttcaggagatttgtgctctttcctggactgcccctgaacctggaggtaataattctagatcaaagtctccctagaaccttgtaaagggtggactgagaagactggatatacagctctaggcaaccagtcctccactgccaccaccatgctttctaatctccaggggagcctggtcatcttgctggacaattgctgtttctcctgacaaaatccaagttaggaaactgacagggtctttgtttctatttctctctatgcctatctctcaaggtgccctgtcattaatgaatcttaatcctcacttttatttctcaactctggctcccaatttctgttttcccacccctcatctgggggagccaccggaaccccctcattaatccacagacagccatctcaggacttcatgctaagaattcattgtttcccactttcctgcatttgaacactggagggcaatgctggaccagccaaagcactctaggtgctccgctccatctttgtctcaaccttgcctgtcatttcaggaagcagcctctggttggaagccaaaaccaaggaccagtggagcgcccataggctagcagaacagctaggtctattacagcatctcccccacacgggatcataggaataaaaggtagctcacggaaaagcacatctggtttcatgggtgacacaatcccctgggaaagaaactgagcggggtgcttgcctaactgtgtcattaaccagaaacaatctgtgtctctgactaggggatgcagattcctacctgtcttcactcactcagatgtaagcccctggagggtaatgtcttagtaaggtctgcattcctgtagcaagcacagtgtttggcaacaaatacttgctggatgaataaatggatgaatgcgtgtatggatacatatgtataaaatggaactggccattttcagatttgttgttgttttctagctcttatgacacccaaagtttaaatcattaatcagttgctgagcattcttagtcttaaagacaactaaggatggtcaggtggttaattaaatcagtggttgtcattgtacaaatgttatttcaaacaccacttcaagagtttcaggtctcttatttttaggaagtccttcattgtgtcatccatgtgtcctcagacctcaccagcctgtggattacaaaatacagacactatttcattaatattcaatttacaagaacctgcgggctcatcatgtggaatattgagtatccgtgatgtccccaagtgatttgtgggcatttcatgtgccacagtgggtccccacggggcttgacagttccatggagccagagctcttcttcaggccatctttcatcatcttgtgagacttttctccaggctgctctcccctctaccttcaccacaatggatcccatgtcaggtggacatggtctactctcttaatcattcaaagcactgctaaatgtttgaggaagaaagaagagcacattttgagacccaaaacccaacttgagactctttctacctccaggcaggcttacgcatagcaaagaccagctcaaggcgcccggtagaagtctgcaggcatctccatatctccaagtgcagagagcagaggagattttttcttctcagttcaagactagttcttttcctgccctgggatgattgacagtgagaaaaaacatttcctccagggaagcgctctacctgcccctccaccttctcagacggggcccgaccttcatgaccctgacaaagcaaacctggtgctcaactgtcttattagatcttctaacactatgtgtgtgacatcaacagccctaactaaattcacacttgggaaaaatatgcccctcattctaactaaacagacaccatttaattttcctaacagaacacttactattttgacgcacgacacctgttttcagttttatgataacttcataatctccaatacaatgagtgagtgtttatttgaaatgagaataacctcattctcaactagttttctcaacagaagaagagtgctcaaagttcatctagggtctttacctacagaaattcaatgctgtcagcaatcttcaaggagcagctctgccaaaggaaaaagaaagaaagaaaaaaggaaatcctgcttttataagttatccctattattaaaatttctaacaaatctctccctacagttcaaacctaggtccccagagtatatgggcctcatccttctcataaaaatgctgttaaaaaaaaaaggtgtcctttgacacctttcctgagtgcaaacagagattgaaaaaaatcattctaaaataacatttttctgtcactgcccaatgggaggtgagttgatcataggtgaagcatgtcctattagtatgtcttgctcaggatgcctttggtgtgagtaagggatgggtttctagggcaaaatctctgttctatacccgcaaaaaacaatgtacagaaatttccctaagagaggagattggcagtcaatacataagactccataggcaggaagtgtccagggtcagctccctgcattcaaatacagacctgcatcagggctgtgatttccaggtccaaggctcggtgagtggataatgcctaaggcctgatgccaggcctgatgtccaggtttaacactgatggcaggccacagaccctcctgtcttgggattccaaaaagcccagaatctttcccagttcctactgacactaacttttgcccgggcaagaagtgtctgagattgcttcccttgagaccatagtcctttcttataattccaaaactaagcagccctgtttatgctgctgtggcagagcatggaatcttggttagtccttccaaactgcacccattgggttatccctggggaaatgatcacattacgttactttgttgaacactgaggactccaataaggactgtgaatcccaactatttctggtgtgggagccagggctttcaggtcattcaccagaaattatccaaccagaaaactttctttcaagttctgttcaaagtccagcagtttgcatacaggattcagatgagacttctaagaatcatctgtgtcttggatagagcaccctggcagcctcttgaaaatcaattccctaagaaacctatcttttagaagtggaccttcacaaagccagtgagagaatgggaggagtatgtggtttccaatgggagacatatatagacttttatgtcatgaatttctgaagtcagaccgtgacaaatgttggtcagagtacaatgcacagttgcccaaaggaggggaaattagcttggttcaggaggactaggaaatcctccccatggaagttttagttaaagtgacttaaaggatgaatgattttgacaaatgagggattggagaaggacatggcgggcagagggagtacagcttgagcaatgtccaggagggatatagaactgtgcttggggaacagtgatcacttggtgagagttgagtctgcctgagttggggcagtggagtggtgggagtggtgggctgtggcttgactgagaaagcttttgtgaatcacattaagggactagattctgttatatgggaaatgggcagaaatcacaggcatataagaggaaatgtgcttcgaagagtgcttggaaagattactatgggtgggaagactggttccaagaccggaaacaatgagatcagatgtaaagttaatacgaaactgaggtagacattgagaaggatcagaaggacttggaaagagaaaacagatttaagaaacacctcaaaaatagataaatgatatgtgggaatgaaagaaaagggagagattgtctcttcccgacatcctggctatgtactggaagattccctagttcccaagccccaaggtcttaccattagaaatcagtccttactcatttgtccattaaggcttaaggtgtcaatccttccaggaatgcttttatgtttctatggtccaaaggcttaatctccagtggcagaatgccaggtaccaatagaggagatttgggggcagtggtcttctcgggaccctcaaaaatcattacatagttgcccactcctcttatttataaagctgttcgtgtgaataagcacccaactactttgtctgtgcccatttgatcactgattgaataagaaataaaagccaaacatctatattctttttcttctctgaataatcttttcccctgtcttcagatttggaacaaggaaacccagatccagggaaaatattctaaatccttgacctccctatccagttggcactccagcccagtaaaatggcttcaagtacaacattcccccaacagcgaagacagccttcctgggagtcttgggtaggcctgtccagggccaccgtgcagcacacatacatcttcccaaccagctccactgtcacaaacaccatccacactgccatgggcaagcctctggccaccaatgccaccccacctgctctggtgtgggcacacctacagccatgccaccaacactcctcgtgcacatgtctatggtgtatctgtgcagtcacagttgtcaccagctcaattctgtgtaaccctaagtccaggcatcttggggtgaatgtctccttattcctttgtccattgtcctgctctccctttaaaattgttcatgagtgtattttgcagaaagatatgtgatcttgaaagacagagaaggaaagagatgaagtaggagagtggcaggggtgggggtacagattttgagaaaggcaagaaaaaagaaaggttccttgacctccatcagtcccaactcccaaaataagactggccctaaagatagcttattatttatcccaaattaaaattttatggctctgcaatcattgtgtacacagtgaaaagaaaaccatcacacaaaagatgcagttatcctcacagtgggaacaatagcagccaagctgattctgctccaagaatagaataacagtgctaagtcaggaactccaaaactttgtcaacaaatagaataatttcttggtgggaaaatggctatgaaagaaggtgggcaggaaagcaaccttctgactcttgaactgggcatgggttgccagggaaaattccagccttggtccctccatagtgagctcacaaccagctctgctgactggggaaaagtcctgcctgaatatgcacagactccagaaggccctcaccttacccttgcccagaatcatatacagaatctaacaggctgtacctgcttctcttgcctaaagttatgcatcattaccagatttccagctccatgatggcagaaatttcagctgatttttttttccattgtatcctcagcattcagcagaaggtttgtatatacttggcactcaataaacacttgctgaatgaacggttgattgattaatcaattaattgattaatttaaaatgagcaaaatactttctccctgtctggcttctgaagagtgagtctgagtactagaaactgtcagataggcaatagaagccacagtccacttggaaaaatgactgtttctacctttgctcatccttctgggcatcttagattcctgaaattcaggaacaaggacccaagagatcatgacccaccaagtgtctttcaacaaaagactattttcctggctgtttcctttcagagaataagcctcctggggctgataagcgaatggcaccatatgctgaaaacacaggccctgagtggcagagggcaccagagcctcctctgaggagcctgttggattgcagcctttcaacaaatctgagtgtgtcttttgatagcatcagcatcaaccacccccaaggacctctttcttttattgcttcagcaatgaagcaaccacatggctgttgtagataaggtggctcaagtgcattgtgcatgcaatgtaggctgctggtgcacagcactgagaatcgcagacacgccgtgtaccagcttctctacactgcgttgcccttcctctgtaagtggcccccaggtaaacgggtgtgattccccaccacttctcatttctcattttctatcatttttttctttgccagatggctcctgcaagactgaaatcacacagccttccaacatggccacaatgattgggacagatgtcaagttccaacgctaatataacattcctgatgggaattatgattctttgtgctggcatctgcaaagagctaaccaaaggtttacctatatctgctatcctttcaaggcaccctggaatcagagcactgctagttgtctgtggacagaaaattgttctccagaacccgaatccttaagcatgtgcagccaagagactgagccatttactgctgtgcactgtgggcaccattatgcatgctggatatcacactgaacaaacactgtaagcctcaagcagcctcaacacagaaaattcaaaagatccaccaacaacacacagggtgtttagtgtcatcttaaacttgcatcttgaatgcatcatcgattcattcattccaaactaaaagtcccttaaggctttcaaattgatgtactgagtattgtgaaggataccaacatatataacaaacacttctcaaataataaaatgtattcagcaggtacaatctcctcacttttatgttgctaaaccatgagaaattaaaattaaatcctgtataattacttgaatcttccagctgacaaataaaagtagtctttgatacacagaaggacaaatgaattgcacacacatacaaaattaaggccagcaattaacatcttaatgacatacccttaacttaccaacatttctaaaagcctggaaaaatattaaatatctatgtatacatgatatgtacagtaaatttatagatagatgatagatgaatggatacatagacaggcaagctgtaagaagcatcataaaaggactgagctcaagttcagactttaaagccagacttcttgagttttgaattccagaccttccatttactgactcaatagctatgtgaccttgggcaatttactttttgccttgctttcctcatctataaaataatgattacaataacacctacctcaggggattgttgcaggaattaagtgacctatagcacatgttactgtattcagagcaaagcttggaacatgaaaagcactcagtgagtattaactacttttgcttttgagtgtgataatatcctgaggatgattactaaatttcccctgtgttgggctgggttgagcctttaggaagttgttgataagaaatgtcagtctcttgaacaattaaacattattttctacattagtatcctatctagtaagaagtaaatatcaatggaaattcagagaaatacaattcaaaaggccttcaggacctttttcctggatggcaataaattattgagggcttcctatgtagaaaaaaaaaaaacagaggaaagtaatttctgcttgaccatcataaaataagcaaatataggctttgcgagatattaaaatacaacagtaaccccactcattaaatgaatagaatagtggaataatgtataaatttaaagccaaaagtaaaattaaagttgtttatgcacatatttttgaagtaaaatatttgtcctatcaacataaaaggcatagtagatgacctgaaaaagtttccacctccaagaagataacaaatcaagtcaaagtcacagtatgcctgacgttgtgtcatcctcaaaaactgggaagtcaggatcagtccaagactccagaagtgaggaggctctaaaagacacctccacttcagcctctgcttattcaaggccccagccatggaaactcgatggtgtgaactgctgagctgagaactgggggtaagtgaggactgtcttctctgttttcttttctgaagatgcagggtctcctgctaattcggattctgtgttttattcattagtgggaacacaaatcccctgctatcttgctagctttctcatttgcagccaacatatgggtttatcagcacggttagccccccaagaacagcccttcagggacatgggataacacaaaatgggaaattcttcttggaataaagagttggggaaggatcctttgtaaaatttggttttggggtcagatttcaaagtcttaaccctcatgggacaggcagagactcggggatatttggtgagtgactgagtccctattcctcctgagcttgcccttccccagggcacctcagagccagaactgctgaatgttaacatggggcactcaggtttcctacaggacacttacaactctggtaaccctgctgtatactctgccagtaaggaactacttagtaattcctccgagagccaacattcaaagactaatgccacgtcacatgcaatagggaaatgcagctctatctgtcattcacatctctgattctgtcattcattactccatgctaaaagtcccagtgggagaaattgtctttcttctttttcaaaaccagcttctactgaaggtaaagaaaagtttaggggtagaagaacaaagtcattacagaaccatgcattgattggtgagcactgcccaggggcaggttttgtggtaatgatccataagaagcaagcaaaattatggtggagtcgatggaatatttgagagtctctgccccaaccatctcataatcgaactgggagccctccaatctccccatgcaagccttggaggacagtcatagaagaaaaagtgagcaagaaggtttaactagctaacaagtgttcatcaagtatccataaatctcagggtacagaagtggcatttttgtattcaatcatgtatatattagtgtttgctatgtgctgtatcccatgccaagaaccaagccttcttccactgtgtaactcataccgtagcagggcttacagtctaatagaggacccaaatcagatgcttgtggaaacaagagaaatacttggttgtaataattatgggggtgttccaggaggaaagtacagattgaaattagaatatttcaatttcaggatgagttaggtgatgggagccaagaagacatgctaaaggaattaaatcctgagctgagactagatatgaaaaagtttgtttatttacatcccaagttcccaagtcagtaacagaagcagaattacaactcgagaaaggccccacttgcttctatgctgttttgctcagcagctgcttcctttggtggcacacagctgggaaagtgagtcacagatggactattggcagccaaaatttttttagagacaaatgacactgtgatttttcctgacacccattgaaattcctcactaatttccaaaaatatcttatgttgttttaaaacatccagtgaggcccagacatttcagtagaacaaatcagagaaacgaagttaattccagccatctgagcattctgagcccaaatcagctagactgagaagaagaatcgtttacttaccgaaggcagtcccaggacacccagcagctaaggtcctgactcacagcattctaaccaagagaaaacacaaacacagcatcttctcttttcattcacttctgttcctgttcttcagttgcttgtccaaccagctggagacacagcagagaaaccagaaagcaaagaaagcaattaggaacaggagaaacagctgataagcactctgcctaggtagaggtgaatcctgggcacccatcagggaaagactttgccattactaaggctttaggtgaggagtttgagggttacgaataagagataaagcaaggaaagggcttttctttgccaaatttatctttttttcacccataaaactcaaagaggatagggaaagaatgaatgtattctcaaatcaaaggaaaaatagttctaaaacttccaatgagtgagaaaatcagaagttctggcactgactcccatttatattgaagtaatactatgggtaaatattttatatcaaagaccccagagtggcagagaccatcagagaatggcattaaactgggcacgcatagtagccgatatggggttaatttgatttgaccttggcatcttttctcttcttaaagtcctcccatcctttctttatcctgtatagacaaagaagactggggtctaacttttatgtgtcttccatcctaagctgccagagacagtcctttgccaaagggcacagtagattgatactgcccatatgtctctgacacggctccactcagctcattcatttatctacccaagtcctacggcagcctaacatggctcaacagactgctgtttccctcagaggaatgttctgtgccagccttgaaataacaagttctgtgtctctcctggtaactatggctcaggcagggggctatgaccaggtcactaaccccaccatggcaaagaagaaaagacaaggcaaagaagccaatatctgtggagggcttacaaatgagtacctggcacaggaataagcccttcacaagtgttctctcatttcaacctcacagcatccctgcaaggtaactataattaccccatttgcaaataaggaaatcaagactcagagttgtaatttgtcccgctactggtaagtcacaaagcaagattcaaaaccatgggctagtagacctgcaaagtcagtgctccatttacatgtaggtaatatgggcactgataccacctaggcagtgagccacaagctattacaagcaggttctatccaagtgggaggaaccttgctctaggtacctagcaggttctatccaagtgggaggtaccacctgctgcagagtgccccacttctccctgcacctaaaacagtggataaaagacctggatttcccatgttttatcctgagttgctggcaaattctttcctaatctcagtcttcactagataagcaaccaaccctcttggttccttgagagttggggcgtctagaaatcctgcctggactagcaaatatctgtgagttcctaatattgaccagctctgcactggacattaggaatgcaaatataaataaggtactgtttatgttctaagtactcttaaagttcaatgcaggaaacaaacagattatcagagaatagaggtgataagtgtcatggcccaacatggcagggggccaggggaacgcctccctcaggtggagttaaagaagggagaagaaggatggtatggcttttccaggaagaaggagaagccagtgtaaaaactgagcatctggaagtctatgacacatctttgaacctgcaagtattttatgtggctaaagtgttgaacacaacactttcctacatctaaaatgtgcaccacacctgagatgaggctgcccgatcattccaacagtaacatctgataaaagaggccaggagttgaagtgggggcaaggggcttatctttgcagttggcttagaggggccttctttatcagttgaagagggcaggaaaggctgttaggatttttgtggagagatgttgggggtggggggtggggtgctgcacctgtctctcacaggctcctgaagaaaggttgaaaataacagcttttaatactgaataggccctctcattgtggaggcaggctgagataaacaggacttttactatcatgagtgctgtagctcattgcagtctttattgtgaaagtgttcatgtgcataagtcagataaagcaaggatggttttccattaccatcctaatcaaaatttccaaagcttttagagatagctttaattcttactctgtgaagaaggatgaatagagtcattttctgaaatgtttccacaactatttcaggtattgagtgttttatatcttcccttagctgccgaagagtcctggggatccgtaggggtgagcaggaaggggaaatgcacaggcttccttcatgccagttgctgagagagagcttagagacaaatacctgtggtaatgtggaatttctgagttgagcatgggtcaactaaattaaaataaaaatttttattcccaagtctcaagttgaaatgggtaagccaagaaggtctgagaccgcagggagaaaactcctggaggaatccactaaggagacaagtaggcagaggcgcttaaagatacaaacattaaacactcacccagggaatgccttcatcctgttggctctctttgttctgctcaaatatctgtctggcatcctctctccacctaaggttaaaaatcgggcattaggacacagagtagacataacgtaaaaattacaactaaaagtcaaccctcctgatatcttctattcaacatttcttccagtgcactattatcttcatcacatattttttatagggtacttactgttcgtggtattggaatgggtcatgggaatagcaaagttctaaggcaagttctattcaaagttctattctcaccaatgtgttttccatttatttttaaaagacagggcattagaaagtacaattaaagattacaaagaatacaaaaatataacggcacatatgataatgagggttagtgatttcatgtgcagtgctctaggagtttatgaaaggaccaattgctataagaaaatttcttaggttcgagactgcagtgagctatcgtcacatcactgcactctagcctgggtgaaagagtgagaccctgactcaaaaaaaagaagagaaatgttttttaaaaccttttttgcttttgtaaaaaaaatttatttgtatatacttagtgcaagcgcaaatttcttacttgcatatgttgcatagaggtgaagcttgggcttttagtgtacccatcacccaaatagtaaccattgtacccaataggtaatttttcaaccctcactcccctcccacctcccgacctattggagttttcagtgtctattattctactctgcatgtccatgtgtacacatcgtttagcccccacttataagtgagaacacacagtatttaactttctatttctaggaaattttacttaggataatgaccttcagttccatccatgttgctgcaaaatatattatttcattctttttcatagctgtttagtatatataccacattaagaaaattgtcttagaatagctgaagcttaaaagaggcaggagttggataagcaggaaggaaaaggaagggtatttcagggtgggtatactagttatctattgtcacatacaaatcacttcagaacttagaggctcagaacaacatttattatctcagtttccgtgggtcaaaaaatccaagtgtggcttagctgcatcctctggctcaaggtctctcatcaggctgccatcaaagtgttacctagggctgtagtcagctaaaggctcaactggaataagatacacttcgagttcactcatgtggatgttgacaggctgatatggtttgggtgtgtgttccatccagatctcatgtttaaatgtaattcccagtgttggaggtgggacctagttgaaggcactggttcatgggagaagatcccttatgaatggtttagctccatccccttggtgatgaatgagttctcgctctattagttcatgagcgagctgatcatttaaaatgagcctggtacctcctcctctctctctcttgctccctctctcaccatgtgacatgtgcccaggctctcctgccctgactacagagaaatggacattagatgtggtcaaggcatctctagagcaatggttctcaactctatccacatatttgaatcacctggggatatcctttgaaaatactagtgtctgggatacatctccagagattttgattgatttggtgtgggcttgaagctctggcttaccagatgactcaacctccttcccctcctcttgctcttccctccccctggggttgaaagcaactggcttaagaccttgctattccaagtgtagtctagacaaacacaatcagcatcacctggaaggttttgagaatgcagaatctcgtgcaccatcccagatccactgaatcagaatctgcattttaaacaagactccccaggtaaattatatgcatattaatgtttgagaagcactggtctaggcattcgtcattattgaaaacgttcatggaggtaaaaaaaaaaataaatcactctttcccaaatgtcacccaagaatccatacttgtaaaaaatctcctgaagggatactgatgtgccgccagggctcactgataggcagtcagtcatccccagttcagtttacagattatttgtgttactaccaatataataaatattcttattggggtgatagtgagtccttgtatgcttcttagaggaaggtattacataaattctaggttttatcatttctcattcatccacaagcaaataaggaagtggattaatatttactgagtcaatatactttttaccacaccacgatggattatccatggaaacccagaatcttgtgccacataccttcaattcaagatcaagccaaaaaaaaagatccacaaattattggtgtctgattaagtctgattgggaagaagaggaacaggagacacaagaatgtgtgcgtccagtggtccaatcctgcaggatgaatgaggacatgaagttctggcccgtgatggattggggtaatgtagaaccagaggttggcctggggtgagcatgaaaaatagcctagagacaaggaggaggaaatcctgggagaaaatacctggactgcccaacaatctgagggtctgcgcacaatgaaaaaagaaaccagacaaaaattaaagtaaaaaacctggagaaatttaaataattcctgtgcttactagcaggtaattaaggaagcattttatgtaacatctgaagcctcagatttagggggagacagggccactgaaggccctagcatagtaagggcatggaccaagtttctctgcagaaatcccgaagccaaatgagcgatatgaacacccactattatttttgtattattcattttctttttttctttctttctttttttttttgaaacggagtctcattctgtcacccaggctggagtgcagtggcgtgttctcagcctaccataccctcctccttccaggttcaagcaattcttctgactcagcctcccgaatagctggaattacaggcacccactaccacgcctggctaatttttgtatttttagtagagacggggtttcgccatgttggccagtctggtctcgaactcctgacctcaggcgaatcgcctgcctcagcctcccaaagtgctgggataacaggcgtgagccaccgtgaccagcctgtattgttaattttcttccccctccactggtaaggacaattgagagttgactaaattcttattattgttgcctccactgttctgctttctgtgattcttatccatcatgagaagggctgacttggaagagttcagagcagtgaagagaaatcccagagagtgtctgccaacactcaaaaagactttgaatttgatgtcagaataggaataggcttgccactctcaccagcctcccaagaagagtcattgggcaggctggatggctagaaaaagaagatacctgtctgacgcccaaaggcagctagaaggcatcctggcttcaggaacagtgccatcacctggctgccctcacaaagaggtcatccaacattgtgaaaccatgactatgagtgaaaggcaagagaaaataagggaatctgaaaccatgtgaatatgccacttcctctgcatcacgggacaccagagacgggcaacgaagagaatgttacttctatcatataacacattctcgattcggaaggtgccacagccttgagaaagtcctcattacaccatcttgaaagctctcagggatgatataggtagggtccaaataagaaaatggactcaaggaaatccaaattgtgaccttcactttgaacaattaaaattttaaacagaaaattagaatcgttgaatttgaaatccagaaaggatcttaaaaacaaagtaggaatcccctcattcagtttaaatgttcactaaatattgaatgagtaagtgatcacccagcctcaattcaaatattttcaatgacaattcttgtttcaaaaaatctgtcctataccaaatcaaaatttgcctcccataacttcatatctttatatttgttatgccttccagagcaacgcagactaagttcaccttcgcatattcaaatatttaaagatagctatcctgtataaccattcctcatgactgtctaataaattttaaactccttgagagaagcatccaagttcaatatattttcctgtaccaatgcaattcttaatagagtgactcatctgtagcgggtagtcagcaaatgtgagttgaatacatgaattaatatctatgtgtccacctgaccaacagttctactcgggtgtctcaaaggcacttcagctcaactccaagacttaaatcaagatcttccttgcaaatatggccctagcctaagattccctatctgaaggaataacaccatcatttcaaacccatccactgctctccatccactgccaccagccaggtcaaaactaccattttcttctttggattgtttctatagccttttgagtaagttagccggcctctggtactattcagtatctcctccccacagcagccagagtgatctctccaaaatacaaatatgatcatgtcatgcccctgattaaaaatccttcagtaacttcccattgcagataggcaaatgaccaaaatccctaaaagtcctctaagaccttgcacagtctgactcctcacctcttctgccatacctctcactcttctctccctcattttccaaacatgccttcttccagctattaaatacttgaatgtaccgggtgccttcccaccccagggtctttgcaacacttctcccactcctcatcccctgtttaactcctattgaaaggagttaaacaaaaaagatcaaagcctacacatccgcttttcagaggcatcttgagatctcctaacaagttcaggttgtttattctttaacgctttcatatatcagtttgtaatattttattaatttgattatgcctattttctcatgagtctgtaagctctggagatcaaggactatatctgcatttgcttattcaacctgacaaatcgcataaacatagctgtgtgaataaatgaatgaatttcccacattctgggacttcccagaatttgatcatcatcacagactctgggctgcagtggggcctcaagccttgccatattctcactttttaggggtctcggagactccagtgtcatcctgagctggagtccaaggcttcttagaaaccactgatttctactcattctgtctggcatactcaagagcccattcttgggcacacaggacaactgaacaggattggagggtccttcataggtctgagccagctcccacatagggaccctgaacaggtaagtaaaacctgcccagagagtctagctagacatgaagaaatcagaggggcccaaaatgattattattttctcagtgactactggctgggcttatgatgatccctcttggtgtttttcattttgcatggctattttcagtagctgtatcattaaaatacacaagtctataattatggggatgcatatcctcatccctcaaatatgtactgagcacgcacaatattcctggtcctgtgccacacgctcggttacaaaggcagccaaagctcaattcctgtcctcaaggtgctcttcctagtggaagaaacagacatgaaaatagaaacttactaacagagaaaggagcaaaccaaacacagagaaggaagtgatggcctagagatggggagggcgtctcagaggaggtgacacgggctcataacagaaaaagcacttgtttccccgaggtaaggtgtgcttgcaggttccttaagatgacccaggagggaagatgagcatcctcaacagttacacacaaacacactcaccttcatctctgatgcttgcagtgaaaataaataactgaaaataggcccaacgtgctgtctcatgcctgtaatcccaacactttttttctttgtttgtttgtttgtttgtttgtttttaatcccaacactttgagatgccaatatgggaggattgcttgggcccaggagttcaagaccagcctgggcgacaaagcaagaccccatctctattaaaataaaaagaaaacataaaatattgaaaaacagccaaaaatatgctgaaaaccaccatggcacatgtatacctatgtaacaaacctgcacactctgcacttgtatcctggaacttaaagtaaaataaaaaatttttaaattaaaaaaatgaaactaaataaactgaaattttatggaaaaatacaaaaccccagactagacacaatcagcttctttttgtgggaaaatgaatttatatcaaagctttcataggggttctataaccacagaatgtagttagttccctgccaagtaaaacttagatacttccaaaatgctgctattgtacacaccgcagaacagagcagccaaaatggtagtggtatgggttgggaagataaagaattaagaaaagtaaagtggaaggggagaggaaaaggagaatattatttccttgaatgatgatcactccttttattaataactttctgttcttattaaagagatgtcccaaacctctgggctttcccagaatttggtaccactggtgcactgacctatcctcatcctgccaatgtgaggaaacccagagagactagtcaaatcccctgcagagcagcaaccacgccagtggggctggctgtgaactttcactttggtgtgttctttgatttcatttggtgtgaaatattgagatttctcctcagatatcccagcgccttgtagctgcactggatctataaatctttatctgggctagattgaaccattttcatttatggagttgtttttaatcagagcaagagtaaaacttttgccctgtacaaaagagtcagctgtaaactgagccattctgcttcagctttcagcttctcctctgaagttgtgtctcttctgagagctctggaataaaacagctgccatagtcatctcacccttccatattttcctctttgtattagtcagctctgctatggtaactaacagtgccaggacctcagtggcttacagcaatgaacatttactttttgttcccacttttactaccaattggctgctgagctctgctccctctgtcttcccattccagagcccaagatgaaagataagccactatttgggacacactttttttttctgacaggatctcactctgttgccgagaggctgaagtgcaatggtgcgatctcagctcactgcagcctcaacctcctgggctcaagcgattctcccacctcagcctcccaagtagctgggactacaggtgtgcatgccaccatacctggctaattttttattttattttattttattttgtagagatggggtttttccatgttgcccaggccagtctcgaactactgggctcaagcagtccacctgccttaaccacccaaagtgctgagattataggcatgagccaccatgcccctccacactgtttttatgacagaagaaaaagaacaagagaaatgctagcagaaactccagatacttcttaaaacttctgctcagacacagcagacattatgtccactcacattcatcagccaaagcccttccatggtcaagcacaagatcaactagtcggggactcacacctttcctgcagaaggcactgcaagacacatagcaatgggtaggaagcaataaccctttttcatggaaagaaggatcaaatacttcagaataataattataacctaccataccctttaactccacccatgtaatttgtctccatcctggggagtttctcctgctgtcaacttaaaaggaatttaaaatgattttttttcttcttggaattcttctggggcaagatttgcccaattattcttcagaatgtcaccatccctcaagatgttaacagtggttgcacaatttaaaagaattccaccatcagataattttggcaaatgctacatattaatagcctcctcttaatatttacaattcttattaccatattaaatgctctgagaacccctgctgtaaagatacctatttaacgtgggattggaatcacagaattctttttgtaatggcacagccattaagacttacgaaattctataggcaaataccgtcccaaaggattacgcaggattcagtcagatagattcctgctgtttcctcatttctgtgcatccagactgaaggatacctaatgacgttgagaggagctatgcataaggccaatgggtctgtacaggcctcaaaaagaaggcttgcattttttgctaagaccaaactcaatgtcagaaacctgaaaatgttattcagatactactctttgtctactgaattaagtataaacacttcagactgtcttttgctccttcctttctttctgcaacaaacgtatcttgagtcctactaggtgccaagtactatgccaggcattgagtacacggtatgagcaaaacagacatgcaccctgccctgtggacttgccagtttaaaataagagagacagacagaagacagggatatgagtaaatagccagtgatcatacaacctcccagtggttagctacaccgttggccacccattcctccttgaaatgctttccacacttagcttctgagatgccactcttggctgattttcctcttcatcactggcttctccttctcagtcccccttgctggctcctcctccactacacagcttctaaatactaaagcagccagggtctatcttctctcctctatctctccctagatgatctcattcaccctcatagcattaatttcacatatgtgcccatgactcccaaatttatatctccagtgcaaaactctcctctgaggatataatcttcccccaattgaaccgccttagcacttcccactcttgagttatttcatgtgttttctcttttgccatgattgttttcatacttccttcatcctcttcctgacttataaacccctcgaggcggggatccttggtctgtttcatcttcagtttccgtagtgcattgcagagtaactgtttaatatatgattattgaatttaatgtttgaactgaatttctgctttagggatcactgagacacagatgtaatgaaagggaatattttatttaaagaaataatgcctcatccttctgtatttccaaatgaacaacctcaaatgagagaacacagctacagacattagcatgaggtgaatacttaagtttaaaaatgctaaatcaagccagtatcatcccttgtggtcacagcagctgctgctgcaaaggttttataaattgcctacattcccgcaccccatctggcgatgctggtgtgttacagccatggatgacttactcttcacaatagccttcacttggatctattccctactttaaaataaaaagacaaaaagaaggtgccaaagggcttgcctaaagtgctcccacccaacaagagtacaattcaaccacataatgctgcctcctcagcatttagaagattagattcagggccaaaggggaggtcagaagaggaaggccccctggtttgcagaaaggtgtttcaccatcagttctaataatagcatgtggcagctgcacttctggtccttcctctgcattttaatcccattattttctaagcctctcccaaggcctcctttaccagtcaaaatcagccaaggtttcatatgcccttagaagaaaagaggactgatagaacctaagtatcaactagagaaaagccaagagcttttcgtgctggatgatccgtctgagtccgggttcctgattgccacacagggaggccctgactatagtgtggacattggttcctttgcatagctccctcttgtgtatacacagaggctgctttttctcatcttgtttgccctaaaacattttttgacttagcctccacatacttgaaacttagagtttaacctgtcaaaatcagagggaaattgactgaattgcatctctttcacgaaaacaaacatcttccaactgccatggcattttagactgccctttctgctagtgttgcttccctattgcatttccctggataaacatctagtttgtgccataatatttattaacaaggagtcctctgggcagacggtggcattaggaatttctgcttggcatttggtatgctgtccagctgagtccccaaccatgttgtgagtcaatgcgaacacagcaggtttcaataaaggcaacagttatctaagcaggctgcagccgtgactctcagctcagcctctgggtcaccaatctgggacgtgagctggcacctcgttaaaaaaggtattctgacagagagatggctgtcagtggactcttccaaaaattctctttccctgggttcttctagtccatctccttggcatgtgccattccctatgcatcttttgttagactacatctctggtttctcaccacagcctggacactgctgatgggctagattgataccgtatgctttgtcatgcaccgtgatcccactcacaatgttattccagtgggatagatgctgagatggttcaccatgcaagaggaatcgtgctgcacgtagtattttctttgccctcctttggtaacttcgcaagttcccacagtcactactcagttatgcacgtgtgctaactcaggctcagactactttgcgattagagccctgccaattggatagcttgtatttctattcaataatcttttcattcactcatactaaacattcattccatagctcaatgttaagagccctttaacttgtcatatacatgatgactataacagcactcgcattctaagctaggctttaacacagcgctacagtggtgattatagaacagccactctgaactgcggcttctctagctgtggtgaatgttataaagaaagtgtatttactctagtccttgcccttttaccagtccccacacactaccaaactcaatataaaccccacataaccagcaagaatatctgaggtgtgcaggttatggcaatgggacagcagcagacgcacagtgggtgaggttcctgggacatgaccaggacactggtttatagtggcccaagctgctgtaagtctaagatcccactcaaatactgtactcactttcccacttgatggtttaggaactcttttctagcccccaaagctacattctgagccactttttttttaaacctacacagctgccttcccaaaagtatcctgcagtaattccatgttcctcctccattgtttcctcgttagctctgactccatgttctggcaatctttcagcctcattcctttttcctcccagtctgtaataaaactaagcaaaaggtagtaggtatattagctcaagaattgggatgtacctgtggaactgttgcgtgatgcaagtttttgtcaatgactatgggagcccctggcacggagggccgggcccaccacccctctcccaagggaaagaggacaagtccccatccatctgtcttctcccctcctctggcatcatagacccaccccagtagatagggtcatctcactgtctcccattggaggtggagtgggggagggtctcactcccagaaatgctcctacagctttctcctctcccttggattgaaggatgaaaggtagttatttgcttccccataggggatgaagcagggagtttccctagggttctgggagggcccacccttgtcaccaccctgtggtgccccaggggtaatcggccaactgaaggaatgtaagatctatataataaaatcttaattccacagaagtatgattccagccacaaaatttaagctctctatagacactaaacactctacatttccataagtcccaccaccaaaggaggagaaaagagcatttatattctctctaacactgcgctatcccctcagcctactcccaaccaagaatcttgagcaaaattctttgctccacttcagaggaggaaagtgggaaatgttttttcctgtgtgcagagactactacaaagagggaggggctcctgttcgggcccatttaaactaattttccatctgctcccaatccaggtttttccagttttacctctttattgggatattgttgaatggaagcacataattaccattattttattttttataaatgggcttctacaaacaaaaacacaggattagtctattattagcatgaaaacctgtgccgtggcttctctgagttctacctggggaccagcacacccccactgtcttccagcgagcagaacaaatcaaagaggatttccagagacagcaataactttacattccacccactgctctccctggggcagcaaatcttcactgtgaaatctgcaattccaggagagcagaaagcaatctatctccctccaaaaacaagttgccatttcagggactggacacattttcactcctaatggtaggtctccttggattactatggtctgccatgagcctgggaattgtaagacaaaaacagaggaaggaaggaaggaaggaaggaaggaaggaaggaaggaaggaaggaagggagggagggagggagggagggagggagggagggagggagggagggagggaaaaagaatgcaaagttgaaatatagcaagaacccattactctatgagtccagtgcgctacaggctgggttccatctcaaacacacacacagtgatgtcccaatgtaaggaatcccaactgaattctacctctcagaagggagctggataggacaaaatttctatctgaaaggtcagagcaggattaggaggagaaaccaagaacacagacttagcccatttcaactagcacagaaggacccagaatgccaggtatgatagcacctaacaaatatttactaagcacccactaagtgcccagcactgttgaaagagatcaagggaacagggagatggttggtgctgacctaagtttgtaagaagtgagcaatcaccaggcagcaaaggtgttgggggtccgcgctggtcatagagaaaggacaaggagcagaagactggccgatcccaatgccacagcaggccctatggtcacaggtgacacctcttccttgtcccctcagtacaacagtgtataagcctttactgtcctacaattcttctttttgttacacagtggctttcaaccctggctgcacatcagaattatctaaggaagttattaaaatcctgttgcccaaaacccaccccagactaatgaaatcagactccgtgggggtggcacctaggcttcagtagttcttaaaactcccccggtggtcccagtgtggggccaagattgaaaaccattgcatggaggtaattgtcctaattacctctccagcttttctctgcctctacattcctcttatctaagctgttatattgcctttttatttttagtttgttctactttgtcctttcagtagataattctataatactccattaaaccttttttcatgctttaactttgttttttctcatttaattttcatcgcccactctacttactccctcttcccattatgtttgttttgttttgtgttttctttaattcagcatcaacatttgcagggcacttgatatggacagagtacggcagcaggcatttaactgctgctaaaaattatatttaacgcagtaatattttgtgttagatcctgtgccgtggctacaggctcttgtcttatggaagattggcactttggcttcttccttggaagtagctgcattgctgtataaatttaagatccaaaataagtatattacaataaaaaataaaagaagcatccacaaatatgagggaaagaagcattaacagcagtctgaagctaaatatcaacatcacccctgccaagctcttggcctcattgtaggtggaagacgctgccatgtgcaacaaaaagagaaagggcccaggctgcatgcacaactaacgaggctgttccctgaggaaagggcatttgctgatttagactcatttcctcaaggtcctcaagcaagcccaagagtacataggccagtcgctgagacactgaaagttgagatgtggaagaaagggccaacagactgtcccagaagcagaatgcttcagtcctccagggaagctttgggggagatctgccctcgtgtcctcctacagctcagctgagagcagccctggagcctcagaaccacaggccctgtagttccctgggtctggcaaacccctgggagaacaaatcactgtcctccccacagagccagcccagcactgagaacaccatacaagccagaggatgcttgccaaatagatgcatgaacgaacgaatgaatgaatgaatgactcctctgatgaagttgtcccagggagagtttgtgggaatactgaaaaggagggtggtccccaagctggtaccccagtccttgatactctgatgtggctttttaatttctctgtcttccttttaccttgatgtatttattctctatcaatctatttgtttatttatttatttactttaggaatcaagccagacaccttgttggagcaacaagagctagagatatttgttccttttagaagaagcaaaattttccagtgccaactgacagggaagaagatgaataattacactatgtcctggtaaagaggacccgagacggcttcctgattttcgtacatcaacaaggagacgtctatgaccctggtctccagcacacctttcttggtagagttgagaattcaaccagccagttcttcctggagattctcagagccacattgagagagcagaggacttacaagtgctgccctatccatggtgactccccttggcctctaggtaagtcacacactgaagcctgcccctcccaccttccaccctggtcagctaatctaggttagtgcaggtctaacctagattacaaggcgtgctcgtgtgcataatttcatgaccaccaacaaccacatggggcaacgttatccccattttattgtccaggaaaccgaggcctggtgtggtaagtgacttgcaagtaagaggaggagtgagatgtaaacccagattcctgaatctaaattcagtggtctgtactgcagcatagctgccgcctcttgagaactagagtgggcagtgtggaagtgggaattcccaagttcccaggcctcttccagctcagtcttctatgtaaaatttttcttttccaggcttgtctgagcagaggtagagtgaccctgccgcctgttcctcaacagtctgtgcaaattcaaagaaatagagtgtgaattcaaggaactcatttgaagaacaggaaaagcaactctctccttgaggttatcggggaaatgaaggttgaaacatggatcagaagacttgctgaggtcccttccaccctcagctcttccattctgttcccaaatgaggcccaaaacacagctttctccatcactctttaatctgttggttgatttgtctggtgcacccaaccagcactgtggccctgaaaataaaatgttaattacatcaatcttacagccatccatcgctagccatctgatgctgatagaaaggcaggaagcactcgtggcagtttgcatatcagggtcagcagttcctttcttaaccctcctctgtctggcaaggctaagggagcagacgttcctgtaatgacctggcctgtctttagagctgcagccctaagagctggttttcttcctgtggctatggtcttggcactgagctccttcctgctcttcttttgctcttgtgtgtagcggaccacaacatgctttcagatcagacatcctgtgggcagaagaaattatttcacttcaataagaatttttgaagaccagtatgggttcaacgggtgcttttgggggattacaccagagataagaacagactaaatcacacgcgtgaggcagcatttacaaatcatacaacacaatatgcaatagcagcttctgagtttctgcagaggaaaggctaaggacagcaacctggttggaagatgcctcaggaacttgccttgaggctgtattttcatagcacataagattgggaaagacatcaaagaatgggaaaccttccattctggagagatggagattatgggggagaatggataaagcccccaaaaacactcttgcctctcctactaactgttcaagtctcaggtatcattatttgtatgacaaagagaaaattaacatcgttaagcaatgagccaagtgtttacaagtataatttcatttatttctcacagaaatcctatgagttatcttctcccattttacggagtataaaaaaattagttttttctagaaatcacatgaagggacagacatccccttggcaggaccaaggaagctgtggcctaattgctggccttgacacgaaggaatgactgagcacaaagaacacagcctacacagggccggaggagggttgggtctgagggcagagccctggtggatgtttctgccttccacctgggcaccctgagacaggctgtgttttttttgaagttccatcttgtcctgccacaggcccaggccaagctgactgctcctgacctggtgaagcactagccacactctgccccaagctcccgccgcatcatcacctgtcctctcctgtactgtcttctacctctggctttgatttattgttcataccagctttctctcttagtcaggcctagaggaaggttgtttttggccattaacaataaattcttaaaattccctctaaccggtggaagatataaatcacagtcataaacataatacacattcttgggacttttcaaaatgacttcctgaataatttgagatagttcaacaataattttctaagaaagacaggcttatttgagccctgctaactactcttttgatattaatacagctttaaaccctctatacttctttctgcctcaaggcttttttaatacatgtcctcatttgttacatagaatgttatttccccacccatgccccatacctgtttcaggcagggtccaagcaggagacagggcactctcggagtgattagagagagtttaatgaaagggacttttacaaagctgtggacaggtgttatggattgaaatgtgtcccccaagggacacattaactctcagtaccttagaatgtgatcttatttggaaatagggtcactgcagatgtagttaccttaaatgagttcatactggagtatggtgggcccctaatgcaatatgactggcattctatatgacagccaagtgaagacaaagacacgcagggagagaaaaccatgagacagtgcaggcggagactggagtgatacaggtgcgagccaagccaaagaccatcagagtttccagcaaaccaccaaaatctaggaagaggtgaggaaggattcccctacaggtttcagagggtgcatggccctgctgacaccttgatttcaaactttcagcttccagaactgtgaaacaatacgtttatattgttttaactacccagtttgtggtactttgttaaggcagctacaggaaattaatacagaagggttatgggaaaccaaaaagaaggtggtgaaacacccagggctggcaacaaagaaccgctgccatgccaggcctgaagcgtgtaggggaggagccttcactgaaacctgcagctgtggaagaggagttatagcttccagtgaaggaaggcactctcctccttccctccagtctcctgaaggtgtctccattggccaaaccaaatgggatggagagccggtggatgctgccaattaaggtcaggctcagagtaagaagtagagtggatgtgcagaggcaaacagactcagtctcaactgcaatgccacttcctcttcagggaagccttccctgacctcctgaccaaacctggcctctgtaacatgctcccatagtccttctgcttctgcagaatacttatagctgcaatggagggataaattatgcaaattattaagtgatgactggctctcatgctagaacataagctccatgaaagaaaacactgtgtctgccattcatcaatggcagaccctgaatcctgagggcctggcatatagtaagaatgactaggttttataggatgtgccaagaactaagcagcctgatagaaaaaggtcaagtatttaagtccaaacagattgaccttggcaattttcaaagagctatagacagcagacagcattatgttctgctgggggacagggttgctgatgatataatgtgtaacatcaaagaatgtgaccaccttgaatacttgctaatagtcctccaagagcagtaggcaggatgggcagttgtgcaaagtgaggcgaggcagaggtgggtggggagagcaactactatggggtcaagaaacttcatctgctcctatctgaatttttttcagggcagtctgttcccagtcacactggggaacttaagaaagcttagatgagtctttcctccactaacctgggaatgtaagtcctgcatccaccctccaatatggaagccacctttgctcttgcctttttgcttaccaagtgactctcttcccagcttctgctgcactctctagttctcattattaatttacctgtttgatttcaaaatttcaaagattgacctttaaactcaaaagtggaggtcccaaaaatcctaacctcccctcttttgaagtccatgtaaatttagcccgtcataagttgagatgtagtagtggtttctaagttttttacaatgtttggctttgtgtaatttaacacaggtaacctaagaacccttcagaaaagaagctagatgagctcaataaagatcaggaaactctggctcacatttggaagaccatgtttcattggattgctctttaacacatgggtaaatcacccttatccaactttgcctagagggagtttgcagtgaacacaacaatcattacaacatcttcagtctttgtgcacatgctattgatctcctcatttggtggttcttttgattacagctgtaaatgccaataattcttcttggtatgaactatgaacatcaccacatagtgtctaacatgtacatctaacctgaaactggaacaacaatatcaaatttaacgtctagggaaggaagcagaaaccctgtcaccaattaaataagctgccttaatctcctctcagttggcctaacttacctgaaccgtactattggtcttgaaggtggcactgtcatcccattagcaggcagcaggccctgcgagcctcctgtgatcagctagatttctctggggaatgaaacagctgctgatagggactgacttcctcagtcacaagtgtttcacaagtgtgttggttcagaggagggaccaggcagaaggtggttgagaggcagagctgcccctgagtgagccatgcagaggatctcctccctcatccatctctctctcttctgggcaggtaaggcagaccccagaacttgggccaagcaagactcagcagcaaagaaacatcaaggctcacaggaccttgtactcatggactgtgctccttactcaatgacctcagcccccagccctcactgagcccctctcttgtgtcttttctctcaggagtcatgtcagccattgagttggtgcctgaacaccaaacagtgcctgtgtcaataggggtccctgccaccctcaggtgctccatgaaaggagaagcgatcggtaactactatatcaactggtacaggaagacccaaggtaacacaatgactttcatataccgagaaaaggacatctatggccctggtttcaaagacaatttccaaggtgacattgatattgcaaagaacctggctgtacttaagatacttgcaccatcagagagagatgaagggtcttactactgtgcctgtgacacccaccctgctgcagctctacttctgagcagctcaaaaaccactgaccaggcgcggtggctcacacctgtaatcccagcactttgggaggccgaggtgggtggatcacgaggtcaggagatcgagaccatcctggctaatacggtgaaaccccgtccctactaaaaatacaaaaaaaaaaaattagctggtcgtggtggcgggcacctgcagtccgagctactcaggaggctgaggcaggagaatagcgtgaacctgggaggcggagcttgcagtgagccgaggtcatgccactgcactccagcctgggagacagagcaagagtccatctcaaaaaaaaaaaaaaaagaacattgccatccatgtagagcagcaattccaacaagatcgtgattttctcttgaataaataatttaggaaatagggaccagagaaagctagtgtttctacctttctttcaggctcagccactcagcttgcccgtgccctcccatggtgctcagataggcagcccccagtgggacagaagagaggagagatggagccaaaggaatgaactgtagcatctactgtgacagttttcttggaggctcataaaaggtatgaccacagagccacagtgcttagagtatagcatagattaaggaggcaccttacaatttacaactatgggtgacatccagtttttccccagccacatgcctctgaatttacatgttctagaggaaaaggactggcagtggggggaggctcctctccctccttcagatcaaatatgtacactacctgtcattttgcccaacatggaaggaaaggctacatctctagcatctctagcatgctctgttgttttgatgattactgactggatattttgttttgctttgttttgttttcttcatgagacggggtcttgctgtgtcccccaggctagagtgcagtggcgtgatcatagctcactgcagcctcacactcctgggcccaagctggatatggtgttttgctctccctttcttctctatctctttacttccacatgtgctagaaacaaaacgttgaaaaattgcttccactggcacttccttatccttctttggacagctcaatttaacactgcacttttatcttgaacaatgtgtttttccagatttagatgattgacggggctctctactccaaggctgaacctgtggcagaaatcagccttccttctgtcctcatctagaaaatctaccacttaccttgttaaataacctcataagaacttgtggtgatagacatggtcagtgacttgattgcggtgatagtttcacagatgtacaggcatatcaaactcatcagattagacactctaaatgtgtacagtttatttcacatcaagtatacctcaatacacttgtaaaaatatttgtttaaacccaaaatggattttttaggcttctttggactacttcaggcaacgtctacacaaaatgttcttcaacaaacccctctagtcaaatatcctctagtcaaatatcttccacagaagtacaaagaggctgacagggcttgccacaccttatttggtttcagtcagggcttttcactgttttgccaagtgtcttcccaatcctctctcctctcatgattctgcctgacctttcatatatataatacatgttatatatatatgttataatgtgtcgttgttccatgcattttagtcatgactgcccccatgagctcttatcatttatctccccaaatagctatattctaaaccttcagaaaatctctcttctctactcttcatcccaaactcactcactttgacctgatgcatgatcccaacataggcctggaacctgccttctacctttctgccccaccccattgggcaacttctttggttgaacggtctgcaaggccctggatactggctctgcccttggacaaaatcgggttcccaaatccccatccagatacagcactctgagctccacgatcttggaaggggtttggacccagccttccccagatgtatttaaacagagggcctgtcatgattcatcaagcccactgcctgccactcagatctaattctccttctttgaacaaatgataggcaagaaggtggagtgcatctccaacatggagaggatacaattattctcctagtttgaaatcatgatttggaaaaagaatgacatctggaaaactggttatgcagatgtcaaagttgtggagccatggttttataacgcctgcaagatggattcctagtaagaccccaagtgactccctctaacagagactgggaagagtgtctctaaggagaaggaggggaaaaaatatctggacaaatccataagactgtatgtcttccgtattaataactaatatctgttgagtgcttactatgtgccaggcagcattctaagcacttaacgtgtgttatatgattaatcttcacaacaaccttagtatttactttctattcttgtcctcattttacaaatgagaaccccaaggcacagaaaacctaaaatacttgcccaaagtagcatagctagtaagggagggtgacagatttcagactcttgatgctgcaccagaggacacagcatgtaatttggggagatgggggacccatagagaaagccaccttcaggatgtgtcagaaccaagggacaacaggggctgtgccctcaccaccaaacctgttccaattgatactcccgtgaccatctgtcaaaaaactgggacaacagaacaatggtcccaaatgacctctcaagtgttttctaactgagattttgtgatcctgacacaagcttcacactgtcttctaaaatcatctgcatctcttcatctgtgaaatggggataataagagttctaccttcactgtgttataaaatatataattatagaaagtaaataaattgcatagcttatagtagctatttaataaatgttacctattataagaaaaagcaaactgcaaggaagaataattgagaagaaagtgaactaaattactgagcaccaacgaaatgcagccactttacaggtatggactcacttatcctatgacaactcagtgaggtcattatcatcctttctgttttgcaagtgaggatactgagactcagacaggctggacagcttgcttacagaagcagagccaggatccggatctgacttgaagcctgattgtcctggctgggatactgggctgggagctgcggaatgtcctaaagaaataccttacctatagcaacatctcatgtaaaggatggctgggaacaggtatgtgaagtctggtcatctttgctcatgcaaagattgctcttgactccttggccagtttccagaagaagggatagtaggaggtcttcaactccttccccctgcctcctctcccctgctttaaaacaccaattgtaatttcagcttccaggttgttctcccgagatggctcactcccctgactgaaggaagacagctactccccagcccactgccactcacactcctgagcaccacccctaggtcagcagcttttctcccagggtacaccatgagaaacatgagagactggcccacatattccctccttctgatgcttgtcaaaggtagtctcttgttggactcccttagatcctcggggtgctcatggattcactgccttttcctctccttttcaggggcttgcctggagcgaaaaccataggggtccaaggccggcataatgagagctagaaaaattccctgggtttctgtcaggtccatagagttggtgactttaccacccacatatatctttgctgtcaagcaaagtgtgcaagtttgtctcttccgttgtcatcgacttatcacttatacagaggcagcaatggggcttgagatctgacaaccacaattctctgcattcaaaagtgagcacacgggtaccagaaaacactgcggtggatgaaggtgcaggagccaccgtgtaaagaatagaaattaatttctaactaaatgtctctgctttagttagggtcttagtccactgcagtatcttaaacaatacatattcaatgataaattttccataatgacaaggtgaacaaactcagaatcaaagctcctttcctactcttcaattcaacacattaccctaaaatattaattgaaatgataggattatacagctttttttttttgtcagagcactttattcattctttcagtaaataccatctctcatatctgcttaatttttctccacagcatttatcactatttggcatgctacatattttacttgtttatattttgttgtctggctctccactggaatacaaggtccttgatggcagagatgagtttttgtctgttttgttcactgctttaactccagcacttagaataactttggcccataacagacactcaataaatgtattaaatgaatgagggaatgaaatacatatgagtgagtgctacgtaccctgcactgagctggatgccagggacacagtggtgcacaaggctggtgcggactctgccttctgagatgttctccccaagcctcatctacccactaaaaaaatgctactgaccgtaacaagattttctgaagagttgattatagagtactctggaacaccaaataacttactcttggagagcagacatcgaggctcctaagtgcattggatgttagcaggggcaaaatgaagaaaatagtagctttctcttttctccaccttttctctcttttgagtcccaagggccccagccctgagtctgaggctgtcaaagaaaaagcgaaacacttctgttttatttcacaaaggaatttcgcaacgcttctctccaaacagactggctggggcatgctatttcacaatgaaaagccacgataacacagtttcctaaacaaaggggcgattcctaactccctctcactttatcaccactgccaccaaatgattttggtattcttcaagaatacagaatccactgggtctttttgggctttttagcaatttacacatccacaaacacataggtttatgagcggtaacagcgtacattccagtgcatgaaacactgcagggattctctgaaggcgtgccctggatgctgcaaggctccaaggcaacagtcagccagtggaacagtgtgccacccagcatgctcgacttgatagaaaaaagacccagtgacagggcaaaggaagtcaagccaacatgcaattgcttgtattaatttaaataaagccaggttctcaaactccatgtttaaataagaaatctaacagtcataagttttctttttacctgcatgcatatgggagaatagggaaagtttaaattatctttctggcttaaggacaaaattgcatgagtatttataactttcagaaaaagaaatgtcagtctaaatatattactagggcaacaaattattaagaaaaaaaacccaaagtacagtcttttggaaattaaagttgctttcatagaatatagcagcattcactcagtaacaattcattaagtacctcgtatgtgccagacgcttttctagacacaatggaagcacagctctcagaatctcaggagcttatatttcagtggaaataaacacaaaataaaataagtaaaatatatgtcagatggagataattgccatggagaggagtaaaacaggcggggagagagagagtgttgtcagcaggcttgcagaaattacaattttaaatcaggttgtcaagaagggatacaataagaaggtgacatttcagcaaaggcctgcgtgtaggcagggagcccagtatttggagtgtggatgtttgctggactccctctgttagaaataacattttcatgcacattcttaagacataatcataccagcttttctgtaggttagggagataaggagtcattttttctttcttatcttgctaagagctctttcacaagtagttcacactttcatttttcaaaatcaagcgatgaaatgccattaattagcacaaagtgtgttggggagtggacgcgagggtttggcaaggaagcagtcctgaaaagatcaaaacttacaacatgaacaggaagatgacagcactgattattgacaaacggaaaatggggcatggcattttgagccctttgccttgagtctctccctagtcacgtgaccacattctgtggactggtgagtgtttcttccccaaccacagggataagaatacaaagtgagtgatgcatttctctcactggtccccagatgactccactctagcagccccggaaaagaacctgcagcctcatctatacctgcaggttgatgtgcctcccaaaaactgtctcactcagttgtggagctgaaatcaatcatgtgttcacctcagtggggttcttggtttttcttttctggcttctccaaaaagccaatcatagagaaacctgaggactgtggagccactatggagaaggctggagtgcctttaccatccctagctcagctttagggattcaccctccaggacctctgagtgtgctgggatcacacggcctaaggtaggccctagagtcagtttctgtctttacctgccacctgacaggagtgagaagttttacttagaggcagtgagaagggaagtcagcagccccagggacagtacaaaggagacacagcctgagtgtgtgttgtcagaagctctgtcacagcgaaggcctcctcgggcataaagacctcactgtgtttgcataacacctgtgttataatcgtgagtgatcaataaaggattaactgcctcagtcatctaaggaaatgaagaagggttttatgcaccaagttcataaataaggacacagaaaaaaaccacgaaggccagtgtagctgcctctgtacgttgaaattagagaactggtacaataacaataacccacctctgtagtaagaatcaatgtaaaatctttgagttcatagctagtccatttctcagcatcaaaaccatcattttgctttctgtatggaggacgtccacccccacatatgcacactcagagtgtcagagcaatgagaaaccaattaccatcaggctccacctctttggttgaagacatagaaactgatgaatgaagaaattaagtgacttttccaacatcacacatatagtgcagacaggtaaagtgatatactgtacttctgtctctttcctccaatatcctagaagtcaagggctaagaaaagacagaaagggtaaaccatgtgatcatgccaaagtgaaagaaaaatggcagcggagtgttctccacattccagacaactacctcctgccaccttctaggtggcaatgcagtccaggtaggtaaagcgatatacaaaaataaatagccttaatcattcacaaaaatattaatgtgtgtcaaatttaaaaacaatgaattgcaaattgcccctaactttggcaagatcctttcacctaccttaaaatggacaagtttacaaatttgggctataaactgcatataagtttttgttggttttttttcttccttgagacggagtatcactcttgttgcccaggctggagtgcaatggcacaatctcagctcactgcaacctctgcctcccaggttcaagtgattctcctgcctcagcctcccgagtagctgggattacaggcaggcacaaccacgctcagctattttttgtatttttagtagagacgaggtttcaccacgttggccaggctggtctcgaactcctgacctcaggtgatccacctgccttggccttccaaagtgctacgattacagatgtgagccaccatgcccggacacatatgagtttttataagtaagttcttttagtagtgaaaaaagcataggctctggaatcagagaaaaatagaatcacaacccctcacttcatagttctgtgaccttgaaaaatgttgctttaacttttctaaccctctattccctcatccacaaaataaggataataattgcatagagttatcataatgatcaaattaaataattgcaagtaagtacctgagtgactacaaagcagaggtgctcaataatactaactccattcctttcagcacccgatggtctgcagtagagcggttcaccctctactccagacagaaggagacagaaaagacagaaaagctagaatgggagagaacatggccaatgaccaccagcatttttccaaaccaagaaatctaaagtgcctatcagcacattttttataaaaatacctcctcaggaatgttcttcccacacaacctctctaaatcctttccctgcactaatgatagtgaaggtcccaaaggcaagaccatcactgggagggtctagctccccaacaagagatgatgccctcattgcccttcatttgcagagatgaaggtgacacaggtcaatgtcagcttcaccaatagtaacagggagagtaattttttttttttgagaccgggtctcgctctattgcccaggtcggagtgcagaggcatgaccatggctcattgcagcctcaacctcccgggctgaagtgatcctctcgcctcagcctcctaagtagctgggactacaggtgtgcagcaccatgcctgggtcattttttaattttttgtagagacaaggtcttcctatattactcaggctggtcttaaattcttgagctcaagtgatgcccctgcctcggccccccagagtgccaggattacaggcatgagacctcacgccctgcatgaatgaattttttacatcaaaccttctccaacaaacttggttcagatgtctgagacaagagttgcacaaaggagtctcagtcttcagaaagttcatccttacccagctttatggatgctctaggacacatttaattcttgcatccatttaggaacagagatcttctcccatccttaaaagggaaactataatattaattactgacctgtgatgagtcagctgtccatcctcatttggcccatgctgtctacatgaagttagttttcactgtagtgcttggccaagaaaaaccaagtttttctaaatgaattccaaggataaatagcctaattcctgttctttggcttcttccactaaagaattatagggacctgatctagggaaactggggggaaaagccagggaatgagagccactgtcttgccagaaatgcatgttctgatgaggaaagatagttcaggatatctgcgccaaatcacacattggaaagaagctttctgagatctgaggaaacttccacctgctaaaaagagctagcagtctgctggaaagaaaaaaattcattcaggtgtcagaactcttactcttcactttgtgtgtgactgtagacaagtcagttaacctctttgcacctcagattctcatctgtacagtaaagagttcacattagattgtctctaagtttccttcagcactaacaagccgtgggacataggagaacaaatttgaaagattcctgagatacaggagtatggattcctgcagctgattcctttatgtgacccagtaaggataaaatcgaaaaaaggaactaaacgaaatacactcttgattaatcaaaggggattgaaagtcgtggctaacctcacacctaccttgcatcacctccagctcacctcccttgagacactcctcctcttctttaatgcctcatcatgattctcaaaaactgtgatcactcaaggttgaagcttttaatctcccatgtataaaaggatatgcaaatagagttcagtttcctgttgagtctctgccaaggtcttagcctggcagttctgggaaaagagccaaagacctcatatttcttggctgttaacattctcccatctgtgctcaagtcagcagcctaggcttcaggctgtggtttgtctttagtcttacactttcccaagttttctgaaggaaccctttagaatgttcctgcaagaaagtaagatacaagtggctcccaagaaaccagacagaggattatctggttatatttggaggcagtaagaaaaagaccaggaagtctatattcctatagtatatagccacagaatccaatcttgcaagctacttgaaatgctgatattaattaagtcttaggcagggctttcaataagtcatctgtgtctccaatatgggatgtcccacatcatgcatatgcacagtgaaaaaaagcgaggtccttgggtacagtacagcattcaaaaattaaagatctgaaaaacacaagacatctcagtgtgcttccgggctggaggctctgctaaacaacagaagcagagaccggactaattgtcccccatgtctctttgactgaactcacacaaaatagaatctaccatttttactcagtgcggggtacccagactcaagtttactgcaatgttgttaccaatattctaatggaaaattatatattcagagctatgttaaatttgaccatttattaaacatgaaatttctactttttctgtaagtgccttgtcttacttgtatttcccggtatttcccttctaaagctaactccccaaagggctttcctgtatgttctcacttccattacaaagtcaatgtacaagttaatttttttaatttctttagaaacctttataaagagatttcctccttcatttctctgttatcccaggcagctgtcaggagcaaagagctcaagcctgcactgccttggaacaggacatcagcaaaagacactctcaatctactcagaaggctgaggtgggaggattgcttgagccaggggttcaagaccagcctggacaactaagtgaggctcagtctcaaaaaaaaaaaaaaaagatctcaatattattgttccatacccagtcattcacttggtgttttctgcagcatttatttataaatatctcagtctgttcttaatccttgagcctatattttttaaaatcatactttgatatctactcagagtattgattctcttcaaatttcccacctcttagttctcctcccactctctcccaccctgagccttacacctccaacaatgatcattctaagaccatttatatctcaataggaaagtgatgtaaaacgggtctccttactctgttttggagggtttttttgttgttgctgttgcttgcttctctgtcccaccccaaactcatgtgtgtctgaaatttagcaccaccttgcgacgtttgtgagcatttttctcagagcagcattttgagactgagcctgaactccactgatgttatgacccttaaaagtgtctggctccaaaagactaaggagttcctgcgtaaatccaggtccagctacttcatcactgtgacttgttattggaaaaggttgagctatcaacatattgctcctgtaaaggctcagaactgaatcttagattcttcaggatatttgagtcctctgaggctcctgggtaaagactccaatgtagcagttctgtggactataaatgggagatatccagatcatacaccttcaatggaagaaaaagcactgtcaccttagacgactccaactctgtagtctacttttgtcttcctaatatcatacctcattctccagtgggtttatggcaagcctcatctactcagaagtaaccaagtacaagccaacacactcttgtgttagtgtggaggcccaaagtggcataagtgaatgtgactccagatgaaaaccttcccctctccaacacaaagatgccaaagactatgtataaagcaagtcttaaatcactctatatttccatttgaatatatttccccagttcctgtgcattgcttctgcatacacagaattcaatgataaaaattgagactgtctcctagatacagtaattaactcagctatcaatgccaattgactgtgtagaggggagacaattttgtaccaagatttactaacctctattttaatggaaaaacaatggaaaagctttcttcctactatgactctctctggataaattgcttgccaggaagcgttaggataattctgccatgactctttgtcttccacacccaaagacatttggtctccatcacatatggaggaaggatctccttgttcagcagtatttacaccatcaccctgacacccgcagtcagatctaactatacagcttggctaataaacctggagaagctcatattctaagaaaaaagtggagagtggtgggacagatggggcctgagtgctgggaaactgcccgtgcccactgctgacttggtcttctcaccagctgcttgatctaacagatgcatcttccttatgaggcaccagagaaccagaatgtccacatcctgtggtcccctgtacccttaacaccccacatttgagttcctttccaattcagaaaacaaaacctgcaggctttgagccaatttacaacagatgtgggtcacaacaaccaactacccaggaagcctccaccagaacgcagcgtgagaatcagcttcttagatattcccatacgtgtgatcccatcaatcatttaacaactgtcaaagagaaagactaggagactttctcccgagcatctccagggatttaattcactatgttggaaattaagagattactactaagccataagaaggctaagacagagttaaaagaattattggaaggttggcattacaactttacgtgtacactaggaaaatctgcagctctacctgtagctttgacataatgccttcctataccctgtccttgcccaactgtgactcccacatcatggtcataccctggataggcccctctctgcatgtagagcaatgtgaatggggattctgcttatcaggatatcatcactagtctgtgccaggccttgcaagaatgtccttgtactgcaactatttgtaccagatggtaccctggccacccctaagtgtgcagactttttaactttttcccccaagaaagtggtccctgatgtgcactgcctactgagtaaggctaagaaagataggaaggaagaggacaaagtgcaaggagagaaacatttttgcaaggagaaaaataatgatgtggatgcagaatatttatcatgtgaattcatattaacctgacttcctcagaaaatgtcaccgttagtattagaatgtgtatttccttcggagctctgaaagaaaatatgagaattcaaggggtgctagtgcagaatacacacacacacacacacacacacacacacacacacactgtgcttcactgtggctggaatgatgcagagtcttggcaatagttcgggaagctgctagctgtccgcccattgtaaacagtgaagtaggtcatctgtggctccccatcctcatctgtctgggccattttcttgggccctcctccacatcccattcctcatatgttctcattctatttccatcaaacctcaatctcaagaaatgacctgaaatcaattcgtactaatgtttgagtcatgaaaacagaggaaggctttagcttctctgagattggcagggagggtcgctagtgagcattgtattttcataaagataatagccataagctaaacactgcagcaaccacagcagaattttccaagcctgaggaacactgcccaaaatgaaagacagaggtttgttctctctttgtttggaggttcagtgtggatcatacacagagagtctggagcctcccacagtggacacttcttttcctctgtccagggagaagtccagctggagcagacaaccagagagaacattagcctgaccatggggaaaggcattgcagcagaattaggcccaatagaggaaaaaagatgcctggaaagaaatttcatttcaatagcaggaatagctttgtaagagctgatagccattcaacagtgaaacaagcatccttgtcagtggatgagttcggtggatgactacactgggaaggttgtctacattggttgggagctaaactcagtgagctctttccctcctagaattcattatatactgtatgtatatgattatatatactctgtgtatgtaatcgtgtattacatatactccatatatgtatattacatatacatatattacatatactctgtatatgtaatcatactccatatacacatttgtatccattacatattcaattttccatgctattggatatttttcctattcaataattttaataagctatgttaatattgtatctagagctacattatagtttactcaatcagttctcttcatggttgagcatttaggcaacttctaaatttttcctactatgaaaattattatgatgaacacacctgtacttacaactttttcattatttaaagtcatcatatatgtatatgatgatttggatccacttccacatcccattccttatatgccctcattctatttccatcacaactcaatctcaagaatatttcagtatgtgacctgaaatcaatgcattctaaagtttaagtaatgaaaacggaggaagactttagcttttctgaggttggcagggagggtcacaggtgagcattgtattttaatagcaataatagccataagctaaacactgcagcaaccacagcagatatacaaatggtatatatacaaatatacaattatatttgtataaatatatataaacatataataaagtaagctcctattttcttaattagaagattcaaagttaagaattttgtccaacttgaatatatgaaactttagggttatagagaaattagccaattctactttagatgttttaatgtattaatacagttaaacacacatattttaaaattacatattatataaaataatatatcaattttgaatactgctatttccttttaataattcataaaataactttaaattcttcacaggcatttcaaatcaatgtatttgttgccactagagccacttttttatcctcaaatatttttccagagtatatgaaactcactttgctaaattgaaaattaagaggcacattagatttagaaacataattttaaattgtttcaatgatggcacattattaatacctactttgagacacaatacatactcacataatattagaatcattgttttgccatttatcctgtaagtgaatattcatgatctccacaacaaaacatttactttgatagatttgtttaaacaatatcaaacacttgcagtcttgaaggcactggaagacccaaaaaatagttactacgtttctgttaaactacttagtcatctttttaactaattctatcagctgactgccataagcatccatgagctagcattgattgagatcattccaatgtgtcctcactaaactgtacttaactgttcaaagccaaataattaagtgaaagtatggtaatactgtttttcataattattgtaaggaatcaaatataagggatttcttcttctctgaggatcatgaaccttactccatgttcaaatagatatagtattttttcacagtaaattccccaaagtggaaatagtcactcaaacgaatacttttactcttttgacattaaccaaatggcttccaataaaaatcaaacaatttatatttttaccaacatcttgcccacattgggagtgtcaacattttgagcaaaagctttaattaaatatccatccaaaaaatggtttgttaatactttacagttttattactagagggttaaaatcctttttcaagtctgataatcaatgattaactttcttcatttgtccttcacccatttgttttttaggttgatggtgttttacttattgatttgtgtaattataataattttgtgtctgagttttacagcatttaaccacaaaaacagcattggtgaaaggagtttcaggggtattgtggatggcagcgggtggtgatggcaaagtgccaaggaaagggaaaaaggaagaagagggtttttatactgatgtgtttcattgtgccttcctaccacacaggttggagtgcattaagcctttgtccaaaaacacccagccgtgacccgctatgtatgtctcagcattgggaagagtcctctgagtgtcatgggaaaataatatatgagttttattgcccctgtgtcccaattattttctgtttactccatgttggtctacagcaatagcttcagaacataaacaaatatcaccaaaaacatcagtgatgaacaattccaaccacacatttcaatgtttactaaatatacccgtggcactgtaaaaaagaatataatggaagagtaaaggaattgggactgatcgtgactgagaacctgtatagtaggctacacactagctatatgatgaaccaagaagttgaacccaaatctaactaacttacataatcccttcctttaaagaacttaatgtccagtgcaaagcaagtgttcaaaaaagtgtttgttgtgaattgaattcatttcattggaatacagcatgcttgcaaagtcccaactttttaaaataatgtgtttctaaagaccactggtctttagaaagaccaatgaccaaagaccttagaccattggtctaaggaccatctggaagcagatccccaaggtgaaattctgacgttgaattcccaaatctaacaggtcatgtgccttgttctgatgagaaaactgtcgaataagggagtagcagtggcatgaaggttgttagtaggtagcataggccaaatggcccagtgatgtgatgaaaagtgcactcctccaaataagaccctagttactagaaagtcacaagtaggtaaacagatgccgggagggacagtttttgttggataaagtcagcagagaaaggcttttggaggagatgaatcctgagctggtgtctacagatagtgacagacttagtgcgactaggaatattatggagaataaaagaatctccctctctaactaatgccaccaagcagtcccttcaccccagagcaaaggcataacctatcttcacccaagtgaactatgtattcttgaaatatatctccttggaactaaaccatttttctgttcacttcaaatcaaccagtgttaatatcatagatctgacagcttagaaggcctgtgttctccttcactcttctcttgaccctatgtgagtttgattcaagagcatggggattagtcccttctcttgaattacaatcaccaatcagcacaccacatccagttgctctttttaagtctaggagagcaaaaacaatgcacaggtgaaggaaactatgcctaggcctcatccctaggttgtacaaagtaactgaatttatggcttcaaggacagaataaatcaaataaaatcaaagaagcccattttcagggaatagaaacaattcacagaaataacaccttgaatgaaattctcatttttagtgcagaaatggaacataacattcttagattacttgctttctaaaagtgaatattctttaggtattactttttcaacattgatgagtttacaacatttctttttgcatagcagacaaaactgtgtaggcattcacagttacagaaagaaaaaatatgactagcttcctgcttcacacaaagaaatcatgcaaaaaaaaaatttcaagccaaaagaaaaaaaaagttttaaaacattttaaagtctcatattacttgctggctgtaatgggaatgtgtaactttgtgaagatgtctgtagccatcttattctaatgatcacttatctttatcaagccattatgtccatcttgacatgatgcaatacacagggcataacattacctacacagtatttctgacataaataaataaactaaaactaatcaaacttttagttctaacaggagacaggaagctagaaaagcaaattaaaggattctacaaagaaacatctagacaaatccagcaggtgagacattccactggacaacaggttcagtcccaccaataatcaatgtcatgaaaaggcaggaaaaaagtgcagtagaggggaagcagtggaaggagaactattaaagattaaagagattttaaagatttaacaacaatgaaatgcacagtctttgaatggatccttgttttaaaaaaaaaaaaaatctgtaacagaggccaggcatggtggctcactcctgtaatcccagcactttgggaggcagagactggaggaccacttgagcccaggagtttaagaccctgtgtctgaaaaaaaaaaaaaaagaaagaaagaaagaaaaaggaaaaaataatctataaaagacatttggagcatttggaggaaaactaggaaaacttgactatgggttggctattaagttattttcgggaatttctgttaactttgttaggtggaaaatggtattgtggttgagtagaaaaatatccttttttgtaatatatactgaagtgaattgtcattttatctgtattttttttaaatactcgagcaaaacaaatagaaaatgtgacaaatgttaacaactgttaaatctaagtgatcattctatagatacttattttattaatctcttctttttggattgtttcaaaaattttataataaaatccttttttaaagtcttcattttgtgggtgggcatggtggttcactcctgtaatcccagcactttggggagccagggcaggtgattgcttgagcccaagagttctaaaccagcctgggcaacatagcaaaactctgtctctacaaaagaatacgaaaatgtcaccaggcgaagtggtgcatgcctgcagtcccagctactagagaggctgaggtgggaggatcacttgaacctgggagatcaaggctcccagtgagccatgagcatgcctctgcactccagcctggataatggagtgagaacctgtctcaaaaaaataaataataaagttttcatttttaaatggccaacaagtctacagcaaatttaaacaatgaaaatatgagatacaatatcttccttaaaaattagcatattttcttaaggaatactgctctgctcgaagaattccctagttctgtaagcgttcgaacaaattaaaatcttgtgtttatataacatatttctaagacaacaatgaattctgtcactaactatatgagtaaaatgaacaagaaaaccactaataatgatggtgcacattttagattccttttattctttttcaagacacagacataactgagatatcttaaaatcactgactttcaagatttgagataatgataataactcaagatcaagtcttccccttgtgttagaagtgggggtgggacagttccagacttccacagttgtaccaatgaaccccaatcagatgattttcaagttacttctccttcaggtgggtgggcatcagagagaagctaagagaaggttttgacaaaatccaaagtgtgtccagacccctcaaataaggtaacctgaccaagtttaatacattcttagggcctaatatggatctcagttaaaaatcctggtctcttttaattcttgtccagttgctaagtgtattatttgacccattaactctgcaagtcatgttggtccattcttcttctttacggttttgcaaaatacatcaggttacagtttcaagtatctgtcacttaaacaagtaagcatttattatttttaatgggagggctaacatattgccacagaaatatagtatgggtactgaagaaaatatacacagactctcaggtcatcactgagccttcccaccatcatcatagatccagcatctgacttccagagtaccaccaagaagaaatcagaggcagatgacatacatatccatggtccttgactctagagagtccagccaaaatgtgtgggtccatttaatcatttctacagaaatgggaggctattgctccaaatgacttctaaccactcactcatccatcactcaaagcatatgatacaattgatttaccagtcattagtaggcaggtagagagtggtgaagcagtggagagagcttggtatttacagctgctattgcaactttggtagcacaaacaacatggaattaggacagggattttcaaagtattgcccacggacttctgagcacctcaagatcttttcagggagtccatgaggtcagaatttttttcataataacagcaaaacattacttgcctttttcgttgtgttgatatttacactgatggtggaaaaacaatgatggataaaactgctggtgccttagcatgaatcaaggcgggggcatcaaatctgtattaataatcatgatattcttcactgccacatattttcaggggaaaaaagttagtttcacttaaaaatgatactgactgtattaccttgctagggctgccataacaaaataccacagactaggcaacttaaacaacagaaatttattttctcatagttctacaggatagaagtccaagatcaaagggctggcagagttggtttcttctaaggacccctcctccatctccaggcagacagcaggcttgccgctgtgccctccagaaaggatggtctttcctctttgtgtggggaacactggtgtctcttctcacagtgtgtccaaatttcctcctcttataaggacatcagtcagattgaattagggccaactttaatgacctcattttaacttaataacttctcaaaaggccctttctgcaaatatagtcacattctgaggttatgggatttagggtttcaacatgaatttggtggaaaacaattcaacccataatactgacaaagcaataacaattattaattttattaaatctcaactttcgagtacatgtctttttagtattctatgtgacaaaatgataagtacacataaagcacttctgttacattccaaattatgattgttatctaagaggaaacacttgtgtggttgtttgagttgcaagctgaactagctactttttccatgaaacacacatttttgcttgaaagaacaattgacaggcaactatggttattcagacttgtagatttgccaggcattttcttaaaaacaaatgaacagagcctgtcatattaaaataaacaacttatagttgttgctaattataaaatcttttttttttttttgacagagtctcactctgtcacccaggggggagtgcagtggtgcaatctcagatcactgcaacctccacctcccgggttcaagtgattctactgcttcagcctctcaagtagctgggattacaggtgctcgccaccacgcccagctaatttttgtacttttagtagagacagggtttcaccatgttggtcaggctggtctcgaactcctgaccttgtgatctgcccaccttggcctcccaaagtactgagattacaggcatgaggcactgcgcctggcctccaccagtactctttagcctctgtcctttgagatgaaaggcgtatatccagggagtcattgccacttcaccctgacctctagaatgaagacacataaaacagacctaaatccaactcacatcttgaagccaagtccaggtggcctgcagaccagtgagcaaaagtgatacatgtttgttgctgtaagcaattgaaattttggggttgttatagatcacaattacaacaaaaatagctgattaatacagatggtgggtcttgagaggattctaccttcatatgcttttaactctatgtctctagcaattatgaaatggcatacctaaaatttttggtggtttcctattatcctcaggacaaaacagtatagcttacttgctcccttaaatgcagttgcattgaactacttacttcctgaatgctctgtgttctttcatatttctttgcttgagatgccctttccttcttctatcccccaattggtccgtagtccctctgtattttcagggtcttagctcagttgtttgcttccctgcgaattcctaaatgactaccccagtgatctgggttaagtgctcacccttttcggaattttcatagcatccagtacttatctctattttcgcactcaaaaccctttttctttcttcttcattaggttgagacccttgagagaagtgatctgtcttgttcatccctgtataccatgtaccagcacagagcctaacccagtgagtgctcagaaagtgccttctgaacccattttaaggatgaggtatctcaggttcagggaagataagctagtaagtgacagagccatggccagatcttcccaactcccaggttctggctcagtgcctggtactaggctgccttatggaatactgccttaacatttgtttagtggtattaaaacacattggtttttaatattagcctgagttaaacatggttggtaagtttaatttgttgtgatttactccataccatatactatattctaaagctgtatagaaatgagtttcacattgtctacatatttggagtattcaagtcatgttctcttccactaagatcaattgcatctctggagaggaatcctcgaatgccacagctgggagatgtttcaaagatcatgtattcactctcctaggttttcagatgagagagtctagaaagatccagagaggtttcacaacttggccaagtcacccaatttcaaaagaacttacaagaaattgggtatctctatcccagtgcagtgatctttttggtacactaggcgaatgtcttctttggtctttcattctggcatttatggtttgagactgtttcagcctgtcagtggatacccttccctggagtggccctaggatagtctgggcaacctggtcctttctttctctgtgtagattttaatcgttatgtgagatgctcttctgcaggaatggggaagagcaggcacaaggtggatgaatcctgaagttcaactattcctggaaggagactgtgtcatgttcttttttccaggcaaactcattttcagaggaaagggacagtgttggaggctgagttgactgtggtacagttcagtcctggctgggttgaggtctcatgcttgggagcaaatatatgggatattaagccaagaaatgaaacagggattaaacaggggcatcctccaggcttagaatatttgggattgtgaactttgagctagtgttatttatctctaccccctgcttctggtattaacacacacggtttgagagttgtagacagactacggcgtgttttaaaaaggataccaggttgtttaacagacttcaaaccatgtcctgggaggaatagctaaaacatatgggagactgtagaccaaaggaagggaggtatcatagtgatcacagtcttcagatatctgtcagagaagagctggcatatcagaagacagttggattctcatgtctgcttatgcactctacctattgcagtatgttggtttggttgaaatatatgaggaaaatctggcctcacatagatatgtagtatgaaaacaaaggagtattttaatagcttgttcaaaatattgtggacatgatattctttatattgcaccataattatttgacaagaggtagtttctttgaaggttagttgcaatgtgaaatctgataccatcttagtgaacttatcatattctgttacattaaaacattggtttatcctgaaatttggatagaacgttcacccatgcatgcttcttaacccatccattagtcacttgagaaaattggttcgctgttaagcagcttccacctgttagcacacattttattattcaataccaaaatattacagtagctaacatcatcactggtctctttaagtcaggaaaaatttttaaatattggtgagctatctacttcacagtgacaaacataaatttcctaaaactctaatttttcctggaagcttagattttctaattagcaggctgggcacggtggcacatacctgtaatcccagcactttgggaggccaaggtgggcagatcacttgaggtcgggcgttcgagaccagcctgaccaacatggtgaaaccccgtctctactaaaaatacaaaaattatctgggtgtggtgggagtggctataatcccagctacttgtgaggctgaagcagtagaatcacttgaacccaggaggtagaggtcgcagtgatctgagatcgcaccactgcactccagtctgagcgacagagtgagactctgtcaaaaaaaaaaaaaaaagattttataattagcaacaacttagcttaggaggctgaggcaggagaatcatttgaacctgggagacaaaggttgcagtgagatgagatcgcaccactgcattccagcctgggcaacagggaaagactccgtctcaaaaaaaaaaaaaaaaaaaaaagagagagtgctggtggaaacccattatgtgacgtgtcttgaagcctcagcttagaactggcacaccgtcacttccactcatattctatgaatcaaaacataatgaagccccaatgtcaatagagcctgtagtaggaagccctgcaaagtcccatggcaaagaacctggaggtacacttctattacagggaggaagtgaagagttgggaagctgcattctcatcaggattcccaacttctgtttcctctaactaatcctattcacaccagtttctgatggctgcttcttgggaaagtcaccagcactagaaggagctcaatgagtctcatatgggtgagtcagaagcttatttcatcaatcagctacctcttgccatttcaaagactagtacctaaggccagctacactcaagagtccaagtgacagttctttattctcacctggttctccccatgaggccttttgctgtatgccatcccattacatcgtctgttattgaagccataacatttcttatttttctcttttcctatttgcttttttttaatcagcaaaagaatgttagactttatatagagagataacgttccttggagtttatggggcaggcatgcagctgtatgtagggtggaaagtcattacaaaggtcataggtaaaatagtcataattaaatcaaaccatggatttggataagactccagggaaagtgtgaagagtaacctttttaaattcctgctccctgttgataaatagcaacaacaacaaaattcctactcttctttcatggttaaagtttaataaggtcactttcgatgagcctatcacctatcatattgctttgttttgacagcactagaacagagatcaaaggcaaacaagaccagtgtcttgtgagccctgaggagaggttttgagaaggcaatgactgggtcaaaactctgaggtcaaacaagattaaaactgaaaatcatccgttgaatttggccagagctgctgcctctgattgctcaggttgtgccttcacaagggcatctggcagagaggagaagtggggctaaaattcaatgcgtgctctgccgccagccaaggccctgatgtggcgttgcatcttccggaaagggaaggccttttataaaccacacaaaagtgcaatctgttcgccaagcttgaacccaaggggctatctctacattcacccagcagggctgccttttctaaatcgcacaaagcaccatatgggctactggcctgaatttagcaactgggaggaggtcaatggaggggacacaattttaaatttacatgaaaaccctttgtaaactgtataacactattcaagtgtaaagcaggaagaggtgattcagaagcttagcaggtgacaggagaaattacactgaccacaagccttttctgcctaacccacagcatgtagaatctccatgagacgtttaagtacccgacaaactcctcagtgggaaaccatttgagggcagactggccagaaagcacagatgggaatggatgtgattatttctaaaagtccattctagtcacaaaccccaaggcagatctagccagtggggcagaagagccccagacagaagcacctgagccagcttggcctgacctaactgtcaggaccctttgatcttgctggagcttgacttggagaaaacatctggttctggggattctcaggggccatatagtgtgaaaccgaggggaagtttttgtaaagctctgtagcactgtgactgggggatacgcacagtgctacaaaacctacagagacctgtacaaaaactgcaggggcaaaagtgccatttccctgggatatcctcaccctgggtcccatgcctcaggagacaaacacagcaagcagcttccctccctgctttggggcctggaagggatagcaggaagttgactggaccagggagatgaccacagctgctgacctctcactcactgctgttcttccttgggtgaaactggcatttctacattttcttacagcacatttggggaatacaaaaaggcctttcttaaaaactattcttgtcttgttttcatgttgattctattgcaaaagagagttatatgagccacctcatacggaatttctaaattcaaacctctagagagatttacccaagtgctttgctttgcagtttgggaggatggatttgaagagagattgatttttttgtaggcaatcaccggccacagttgctcattctaaagctgactgctctgtaaatcacccagtgcttcatgccaccctttctcctcttgctgtgccacacgttatctgcctttaaagcagcagcactggtgtctgtaaaggccttaaccctggagtagtcatggagccaagacccacccctttgacagtgccagctttccaacacagagagctgagtatgggtctaggaagtgagagcaatgtaaaacaatagaaagcaacagttcagagcactgcatcaagtgtactgtgctggaaaggtccgccataggaaatatggtcctccatactcctcagacaacagccttccgaaagcaaacctgtccctacctgcagatgattaaccatctatgaaccggctgggtaagcaacaagtgccatctttcatggagctgagccttaaagatcctccagtcctaaagctgacgggaagaaggtaggtgggagcagcgctgaggtttttggaacgtcctcaagtgctgtgacaccgataaactcatctttggaaaaggaacccgtgtgactgtggaaccaagtaagtaactcatttatttatctgaagtttaaggttaaggcatcctccatctaaggaggcagaaataatcctgaaatgggaaatgggtgaaatagctagcatttaggaggactcctgggaagaggtgaaatatggttaatcctttccataggagaggagcagaaggtgtctgtaaaaaaagagtttggggcatatgaagggacccttctggctcagaggaaacagagaactctgcccagtccatcgaatttgggtcaggctgtagaaaccacagagtcattggcccaactccctgagcagagtcagaatggacacagaatgaagctgacttgagtccaggtggttttaccaacgtgattccaaacgttctgacctcccttatgccaaacacatcctcctggaagagctcagaactgaatccgtctcctgggcatggagggtggggcgagcgcaagtagtccctggtgttgcgatatttctctttagaagaaaataacctgtttcagacatttgtttctaattgtttgagctgcaaatgaaaactaggttactagtgagaaatatgggacattctggttcccactgagaccagattccaagcaggacaaagtgaatgtgtagtgcttccaactaagaaatgctttgaagtctccaggacacagccaggagagttccctaccactcaccagtgttcatcgtttttgcaaagagtatatggtgccagtcacttattaacagttatgcaagaatcaatgctaaggttgttgaaggattgtgctcaacacagaaggcatctttggtgtcctttcaatgacatttgaattcgaccgtgtcttgctaaaaaataaaataaaataagacagtggtctccacctggcagcagattccagttagatagtacatattaatcttaagtaagaaaatgtaataaaccaatacaaaaacccatttcgaaggtcctagggaagtctagcaataggggtcagtggtcccaaatctgcccaaccagctgttggaaaagaaacagcatgccctgccctggctgggactttggcactcagctcaggtttttcaaggtaaaagaaggctctagagagatagggtggtgatggtgggctcttctcagagaccaaatggggacaaagcagttccaggcatatgcaggcaaggaggctgaggaaggggaaggacaggcatgagcaacccaagacctcacacactgcagggagaaaaggggcaggggccctgccgtcagggagaaagacacccaaagttgtgctagtggagtcagtgcagagatgttcagacttttttaaaaaatcaacatcttagtaagattttgaaattttaactaatttgggcctttgcctttagaccttattatccttaaaattttcactaaaataagtttatccacaattccaacaaagctaaagactgattatcctaatttccctttgtttgccaagtaagggatgaattaagttcctctgtttacccatttacttggtccatatttccctaactgcggagtgcacagcacatattttcagatggagagacgttctttttatttgcatggatctatcttttaatggctatcagaatagtacaactaggctatcaaacccatgtgatttcaagtttccttttaattatattttaagttaaaaagtgaataaatttttttaaattattaagcaaattatgacagatgactatgaccaaaaaagcgggggagatgtgcttaattgaagtttgggaagtgctgaacttcatattggtgcatttcatcagcctttgaagtgaaaaagtaaggggtatccagagggggcacaacctagaatatctttgaatggcagcttctatttttaagctaccaacattggattaaagagactgcactgcaaacccagggcctttatcttctcagaagccttttgatgctttttttttccttgggagcttctttcaagttcttacttacggagctcctgggtagcacaaaactaacagaacaggtctatacaaacccacagctgtagatcccacactttagtcctctggatacagtaaacctggagagaccacttagcttcgtaaaacagaacagagaaacaggacaaaacagcatggaataaagtaatggaaacgtgtacttctatggtaacaacagcggcagtggggaaaagaggcatggtcgttgggaacatctgcgtggaagtgggccatgtgatggactttgaatgcaatctattattgtatgtcacaattatgtaactaccactttttgagtgcctaccatttattaggccactgggctaagtcctttaatgattatcacttcactcagtcctcactacgatcatgtggaattgaggtaccatgacttgcgttttatggatcaggaaactgaatcttaaaggggttcctcaagatcacacagcttagtaaagtcatcatttgaatcacctgcttgatgccagcatctgtgctcttaagaagtctgctcttccatcagggctgcagctagactagggcatgtgtggaggtttttcctgcctggcccagcctctgcctcaggtctctaatgagctccttttcaagctgaatcagaaacaacagttatgccacttcccttccagtgccatccccatcacttctctcaccaaggaagaacttctgaacccccgccaaaaccagttacccaaagcagcattccccttccccaggaggagccaggtgaggcccatctctcacattacacccctggagacccagggtccctaaatacagaaaggtccagacgatgatcagagcatcactctttccctcaagaaaaggagtccacataattctggcctcatcaaaatgtttctcagattccaaaagatgaccttcccattcctccaggcccactagcccttggcctggcatctggcactccctctcactcccagtcagcatctcccagaacagagcctttgcacctgcaagtccttccacctggagccattttctcccagggactcacacagttttctccctcccctcctccaggtctccactcaaatgtcatttccagtgaatcctttccctaccacctcatgtcactctgaagacccctttccctgctttatttatagccctcatgtctacttgaatctttatatgctcgtttactgtctgtttcccttgctctgtgagagaaaggactttgagttgtttcttactgcacctataagtacactgaaagcactaaacaaacatttgttgaatgagtgaatgaataaataaaggaatgaatgaatcagagaaaaagtcagctatggtataaagcaaaagaaaagaaaaatgaagggaagctggtaacctacagagccgagcctgagtcctggctctgcaacccatcacaggtctctgccacgaagtgccaggcactgttctgggtgccagggaatcgacatgaacaaagcaggcatgaacttctgccatattggagcttattttctaatggcaaaagacagatggtaaactaaataaataaataaaaaatatatacagtgcgttagggtggtaataagccctgagaagaaaaataaagccgggaaggagaataaagaggactagtgggagggaccagcatgcagttttaaacagaagagtcacagaaggtctcactggaaaggtgacagtggagcagagacccgaggaggtggtaaagtgaggcatgcagacctctggagagagagcacttccaggcagaggggacacagggctgcctggggtgtgtggctggaggaggggagggagtgatggggagagaatgtgaaaatgaggtcagattggtgatgggttggggagagggtggcttgtaggccactgtaaggactactgcttttggattcgaaagggaagattggggagtagaatggaagtcacacgtaacctagagaaaagatctagagagacagaaacctgaataccagtcctaacccacggccctaagaagtgggcaccctcttcatatcacataacaccaaaaaatagcttctgttctttttcagcaacctgtcccaacaatccttcctgcttgggagctctgttcttagtgcaattacattccccacgcttctagtaaaatgtatcttctctgagtttagccctaataaacattctaataattacatcgagtctctctagttcacagatgctgtatctaatcttataacctataatacggaagatgttatcctcacttcgtagagaaaccagataaagctcagtgagtttaaggaacttggccaagattacacacttggaaagggacagagtcaaaactaggttttggatcttctgacatccttctactttacaacgactaggaaccacccttcatgttagtgattctccaactatcatctacagtcttttaaggattgtaaactgatccgaaaaatccatattccctccttggtttttatgagtgacatacaggcaatctcatagattctgatgttcacgtataacagaaattaatttaactgtcacttctaagtgtgagagtgtcattgaagcttgctaaaatttgatatgcatgaatgtgttattaaaatggatggaaaaacttaattctattttgtactaagcagtttggctgctgcacaatacttggcaatgatgcaaaactctcagatatgaaataaatttcccctaaaaggttggaatgcatggtatatataacctgctaggtccctgcctcacctaagtgtagcccgaaggtggagaaccactgctctatgaccaacgttccacccttctttcctcttgatcaaaccaaaaaacatctttccagtctatattcattctctcttatttgagcacaaattctgtcagattgtaatatgggcaaaagcttggatttctatttgatgctagagtcacctcttgttccatcctgaaggacaacctctaagacggaggagaagaggctaggccagatgggacagaaaatcacatgggatgaatatcatgtgacttggcaactggggctagggttgccgtaaagggaaaagcaaggtagtttttggattaggtatgtcagctgtgccagacccctgatctttggcaaaggaacctatctggaggtacaacaacgtaagtaacctacttttccttcttatgaccactatgtttggcaattacatttgttaaatatttttctaagtcaccaggttaggaagcagtgctccagtaggtaatatagcaagggatggcttgaggaacaggaactgagtttccgataaaatccaggatggcgtctgtgcttcagtgagccgtcttgatccattgtccttcctagagagtttctattccctctacctggctccagaaagctaccctcctcaacatctatgcatccaccatgtacagatctaggccaccactgtgatcagactcacatgacagcacttcggggggtggacacaaggtgaaatgaggagcacgctgaaccagtaaatcagaggccaagttccaatctgtccaatgcattaactgacaatgcattagctgacaaactctgtgacttaactgcactgaactatagtttccctatagttagatgaaggatttccaagctgtcttccagcccttgcccactatgatcctgattatccccagaccaattcttatgaacaattgggaggaaaagcaaggaagcccaatggtgtgactgtcctattacccagtaggaattctgtgatttaatggaaaaaaaaaaaaaggcactggaaagggagtgaaaactctccctatgcatcccttaattagcccttgtgtgatcacagaggtttggaaaaatgatgccttgaggctcctttcagtcctaccatctattactctggttcaggggctggaaactggaaattgagtgaagcccaactcagccactcacttaaccacctttacagtgcctttgtctgtgagatggatctaaaaatatcacctcatagagtttatttcaataactttgttgaagtagtataaacaccagctgtttaagtaggaaagtatttatacaaatcatagtcatctgtgattattatagtcctttggatagaccccaagtcttttgcatcaatggctcttgctccaaccattgtgtccttccacctctcgctgaggcacagtcctgttgtgattgatttagttgaggcttgttgttacgtttctgcctacaacggccatttggcaattctcagcaaaatatgtgaaaatgttatcctgaagcaagatctgggagtaagagatggcaggttgaggagataatagcagaaaatctaaggacttgcctaagtgtcaaaactcagaagatagcagacatcaaaaaagctgccaaaatataatgctcagatctcagaaacccttgcaaagctctgtctccagctacacccattctgctccacccacccacttccaaacagatgaattagactgacagggagcaaataggtagcaaggtttttcgtaatgatgcctgtggtagtgctttgacagcacaactcttctttggaaagggaacacaactcatcgtggaaccaggtaagttatgcattttactacagctcagtgtgtatatttctttagggttgttgtagcgtagtcctgaatgaatggggcttcttgggaagtaaagagttccaaattagaaacccattgtttgttgcaaacagtaggggtaaaatttgggagcaaatgcattagatttctcttaagaaaatattctgtatatgcttggaaactccattctgaggcttggtattcataagttttttacaactactgaaaaaaagccctaggtcaggcttttagttttgggctccctagaaccaggaaaaaggcaagctgtggttgaggagggtctctccagtatttatgagggataaaagtcatggtcacagtgtaggaagagggaaggttagaaagaaaaaagtattacgaaagaaggagttttaaaaagaggatctttctctcctctctctctctctctctctctctctctctctggataagaagccaatcttgcccttgtcacttttttctgaacttgcattaaaccaacataaatggttcagattaaatggttctcaaggtcccatcctggcctgggtctgctgagagcagttatgagctcacctctcctgttagccctgaaactgggaactttgcacaatggttcaggagcctgtatccaatgtagaaacacagccaccaactccaggacaatagagaagtcgtggtcccctactggagacattgtctactggtagcctactccaatgtttggaaatccaggggctatattctggtagtttgggtagctgccaacagtcaatcactaagaccagtccagagaatagccttcagacaccttccaaaatgccaagtccattgggagagccattacctcttacatgattaggtattgattttgtttattcagaggaaataaataagtagggaatggtacatgaatgtggctaggctatctgaccaaaagtccaaaaagtgactggtgctgtcaacatggtctctgcctctcagagaataatataaacttatagggattctccactgcctgttgcctccagggaaatggtagaatttggtgagttttcttatctttgaggggagagagactagagcactgaaaaggagggaaacagaatcatgtcgtagctgattgtagtctgattgatgtttagcaaattgcatctgagcaaaaactactgtgtttcattttcccctaaaatcatttccacttgaaatttggaattatctgcagtgttagaatcaaatctttgaggctgtgcctttgggagtcttagggaagaaggaaattgatgaaactgatgcttagcccctctgccaggatgctgaccatgctccccgatgacactccattcgcttctctggttttcttctcctgcagtggtgaaatgtaatatgatgatgtgaagctcaggtaggggatgtgaaaattttcaaatcaaaccccaagtccttaaagctttgacagtgaataatggccctacacaactgtcattctcttttgcctggctctagcccaacgatcttgatttttggtgatgaggcagagtaattcacatggtctttatgttacattgcacatgatgactatatactcctgaaacttatatctggatccagagtcaggagaaattataaaacaaaaataagcaatgcaaagcaagcactggcttctctgacctgtgtccatgacacacagcaccagtgggctccctgagcagtgaccaatttcttgttcaaccctcaggtccttagaaagcctttcgccaagctcagggaattagaaagcaggttcgttattattgtgagactcagtctgagtgatgggggaaattaggtttctaatcaaaattctgtacttgtgacccaagagaatggaaccagagtataataagaatggaaactctttctataaccctcctctcctcaacctaacatttgttgtaagaaaggtcaagttaagtgccccatccctaccctcaagctattgtgttcttcttggatgcccctctcaataaactggaagttagattttccatcatgaaggcagctatttgtcacctgccaccctcttctcttgctctgtctcagccctgccctagtatctcttggatggggatatcaccctcacatctctatcaagcagttcaactattattagcttcaaagggaactgagactctgtgtactcagccccttggtctcatcaagagcagctttgtagttctctgagctgtggggtctctaggctgagaactgaggctggggaggcagggcacagatgttacagctcaggccccagggccagctccaggctagttacctgtgaggcactgtcataatgtgctcctgggacacccgacagatgtttttcggaactggcatcaaactcttcgtggagccccgtgagttgatctttttcctatatttctgggataatttgagtcctggcactggggctgcaatccagtttgcattataaattataactagtaaatgaaattataacaaggagacagagtattacagatgtgaaataggccagagtgaacacactagactgagtcacttaagtagctctgtaactctatttattttaatatatatactctatattaaaacaatagctcccatttatttctgaaatcttcagagcagcccaaaaaacacaaagaaatctagaagaactacactaagagttggagcattcaggtgcaagggagacagtgggagggatacttcagccccaattcctcaggaagctgcttcatctctgcacatccctttggctaagctaactagtatgcgtgcctccttgcaaactgaaaacaagtgtcctacagcttggaagattctggagaaaggtagttagcatggtcagagtaattaggtagaacaaacttttatttcagggtttaagttaaatcccatattggcagaaagtcttgaaattctgagtgacatttattacagttgttgcaattcttaggggatcagtaggactagctatgagaatctaaaacataggtgacttctaagtttataaattaagaaagactgttcaggaatggtacacacttttttggtattgtttaccagcacataaacttagcaatgtattggtgttcataaaaagagaaagtctgacaataaagcaattttccaaagaaataacacttgaaacacatgttgcaatgtaattatatttgtggactaagaaaaaaagactacaagttcttcaaagataaacgattaaatctttaatctaaattctggactacaatttcatacagcttcacgtctgggtttaagtcaaatacaaaatagactaggatgcatatggcaactatattgagtgcactccagtttttaaaaaggtttaattcagtcagacacccatttctttggttaccaagatgccaaacaatggattctataagacactttctttcaaacaatcgttttgaaaatataaacattaatgtagaaagagggattcagaaaaatgttttatcaaatcaatgtattatgctctatctgaaatgctgactaacagagtcagagcacaatatcataagtgcatgaccttcttcagacatctgtcttttcagttatattgtattattcaaattactcaaacccaatctccccagcccaaagtgatgatttgacaactgcctgatgaatttagcttttaaaattctagcaagccttaattatccaactaaatcagaccaggattaagagatactcttaaataaacaaggagatagggtgtttattttatggacaagtttcttttgtaacttgtaactcccttgaaagtcagccagagtatgtctcaaaccaaagtcaagatagtgagcaagaagtgttgcacttatgaagggaggtgagtgagcaatgcatgtggtttccaaccgttaatgctagagttatcactttctgttatcaagtggcttcagctatgcaaggaaaccaaacaggggaagttttctcaagcaggttgaaagcaggttccaagaaagccctttgaaaaatgtctaatcctttcaattgtctagaactaaagccaaaaacataaggaaccagattcttaggaataagtttcctgccctgagtgactgaaacagaatcagtcttttagttgagcttctcagcagaggaaacggggagaatgatgatggtagtgatggggggtttctctgaatagttgattttctaggaaaaccatgatcaactttggtccatttacaaagccgtgatcagcagaaacttcctgactagcaatcgccccctctcaaccagatataaccagttgatctggcagtagctctgctgctgtgaacctcacagctgaagcccaaattcagattcaggataaagcattagaaaaattatttatttttatacagaaaattagccaggtgtggtggtgtgcacctgtggtcccagctactcggaagactgaggctggaggagagtctgagccaggaggcagaggttgcaatgagttgatattgggccacttcactccaacctgggtggaaaagaccctgtctcaaaaaaaaaaaaaaaaaaggaaaaggaaaattacttattttccatttacacattcattaccaactttctgttcagcaacacctaatgtcttgattatagaccatagtaggtaaaagtacactggaattcaatgtatttttcatttgatatcaagaagcaaaattcacctaagtttcaaatactaagggccaaatttacaggagcaattaatattaaaagtcagcattaaatttaggattgaaaaatgtatcttgatcatcattcacaggttggttgtgtttcttggtttcaggtattaacagggctctttctttaacagttatttgaagatagcctaagaatttaagtccccatggacacaacatttatcacaattcaaaaacttcagtgaggcactgtgtgaaagaatcatcactacctctctcaaagcttcaagacttgtggtcttaaggaaagaaaagtatgcatgtacagggtggtagtccaaagtgaggcacaaaagaagagaaggccaggagggaagccaatcctgggaccaacattccacagttcctcttagattaaaacaagaatgaacgggcttcaattggttttatttctttaaggacttcctgaaaatgatcattgttatcctctgattaaagactcaaaggaaactatacagtagtcagtcccctacagaagaatgagtattcacctaaaggcagaaacatgtaccacctaccttcagcagatccctttccaccctttccagcagatctggaagggatggcacccttccgggaccccaacactgccatcctcagaacctctgagccagttatgcagtccttctcagaccctcgattctttaagtgacagaatgcatagcatgagcacctgccctgatctaccatccaagggcccatgcatttacaaaaaaccaactggtgcagagagatattcagcctgacctagattgtccagaggattgattaataaaacacagataatcggctggatgcagtggttcacacctgtaattccagcactttgggaggccaaggtgggcggatcacctgaggtcgggagttcgagaccagcctgaccaacatggagaaaccccatctctactaaaaataaaaaaaattagctgggcatggtgatgcatgcctgtaatcccagctactcgggaggctgaggcaggagaatcacttgaacccgggaggcggaggttgcagtgagccgagattgcaccattgcactccagcctgggcaacaagagtgaaactctatctcaaaaaaaaagaaaaagaaaaaaaagaaagaaaaagaaaaaagccacagataatcgaaacccagatgatccagaaacttctttgtagttgtcattttccatctgtgcttccagccctatctcctagcagctcctaactggaagtcaaacttactgcctttcatttctgctccccttgcctgtcctttcacagaggtggtaataagcccaggtcactaacaggatgcatggaggtctggattgtagtgtttggctccagggtaatcgaggtaatcaccactgtttaacccccacaaagttgtgaataatcatctcacctaataagttgattatatttgcaggaagtcagcctcataccaaaccatccgtttttgtcatgaaaaatggaacaaatgtcgcttgtctggtgaaggaattctaccccaaggatataagaataaatctcgtgtcatccaagaagataacagagtttgatcctgctattgtcatctctcccagtgggaagtacaatgctgtcaagcttggtaaatatgaagattcaaattcagtgacatgttcagttcaacacgacaataaaactgtgcactccactgactttgaagtgaagacagattctacaggtaggccatttctagcttcaaggagctggagattatggggaacaagaattgggtgaaagggaagttagagatgtaactgtggacaaatcattctcagtatagcatcatgctggaaataagacttaggcccaactatagcctgccattggcaggggagggaaatgcttgtcatccctaagatggaatctaaaataaagcccatcttatttcttcctcatctctcctctttacctaccactgtccccttcatactagactctgggattgaaagtcctcgtgcattctaatccagtgctaaattccaacaaagggcaatgcggcctattgtggggctaagaatcctagttcttcccgcatattggtgtgcctggatgttgacctcatggtacaatgaaaaaggctagaatgggaagcatgttgtataattagctatgtgaccttcaccaagtcacatcctctggtcctcagttcactcacccaaagtctcctccagttttaaaagcctacaatcctgtgagcctcttcattcccaatgtaaccctgaccactgctgtttgttccagatcacgtaaaaccaaaggaaactgaaaacacaaagcaaccttcaaagagctgccataaacccaaaggttagttcaaatcaaagggccaacttcagaatcaagggttaaagcaaactctgtaattgtccactggggccaaaatgtatcagatttcaaaagaaaacacaaaccatgctgagcccagttggttctgcagagcctctgactctcccagcaaggcttacctggctgtcggcatcggtttcccaagcttgcctggctgggtgtcagcagcagcctaaggtctctgacggctatctggcaccatgctggacttgcaggccagaaagaactaggcagacttggggcaggctaatatcagtgttgcaggcccaatttctggaagggaatttaatctctccctgaagccaccctcttcactctttttcagccatagttcataccgagaaggtgaacatgatgtccctcacagtgcttgggctacgaatgctgtttgcaaagactgttgccgtcaattttctcttgactgccaagttatttttcttgtaaggtaagaattagccgcttcttattcctatctctacccacaccatgctgcacatggggaaaggggatttagaaatggctaagaaaccaagaagcattggaaagggaaaatagagacatacttagaattaataaggtaggctatctcagctactcagcaaaacagcaccccatttcctgttatcctttcattttgagtcagactgaaacccattaggtagtataatgtactatttttctaatataccagagaataaccctcactttcactccagggagaaaactgaagataaataaggagaattcatcttctttactgctattttgttcatcgaccaagagaccatgggttatttgcaaggccataagtaaagctttgcctgaagactatccagaggaagcagaacctatctttgtcctgataaagggaatgccagctcacactccttaatcataggaccagcctgtctatgtgtggatcagcctgtctttgggatgaacctacacacagcattagtagtgaacagctcactattagctactcaggatgcatacacagttaggtttgagatgtcaattatttgcctgttacttgcattccgttctcaggtaatctcatacacgaaattgaaaccagggcctgggtttgcgtgtgaggcttctccccctcactccttctccaatactcacaaatgctcatcaaccccagcttctgttctaggaacaaccctagactcagagtacttgactgatctgacccagacagtaaacatacccagtcatctcaaaaagggggtccagctcacctgttattttactaacagtcccagggacacaggcagtgtggctgggtaaaaagagagctatactaagagtcagaagatctgggttttatcctgattttgacactaacttacatgttaccttagccaggtttcttcatctctctgggcctgggtttttgcatctgcaaaacaaatgagttaaaaaaaataataaccaaaggagaacaaaagagtctcatgacttgtgccaacactgatagctgaactagctgagctattgccatgtgtacatggaaagtgagccacaatagattagtgatgtctgcaatggtacagtatagcaagtaccggccaaccccagactacatgacccctacgattccttctagcactggcagtctattctataacaactttcttcactgcaggctgactggcatgaggaagctacactcctgaagaaaccaaaggcttacaaaaatgcatctccttggcttctgacttctttgtgattcaagttgacctgtcatagccttgttaaaatggctgctagccaaaccactttttcttcaaagacaacaaacccagctcatcctccagcttgatgggaagacaaaagtcctggggaaggggggtttatgtcctaactgctttgtatgctgttttataaagggatagaaggatataaaaagatataggactctttttttactcctacaagtgatacactttgaaaatgatgttttgttccttttgactttctttaccttttgaagtagaaagtgggaaccaacaggttcacagcttcattcctcatgaggcaaataggccttgggagaagaagagcgggtgcccttttatctaaacatggaaggctctgctcaactgagcactagatttgctacaaaccagcatcatcttcttcctcctgtcctcacggcttgtcccaccctctatgttcacttcaggagccacactagagattctgcatggcgtggaggaggacaaagtttcagcactttctgcctctcctaatactttacaaatgagattacatttgaatttgctaatactttatgagcaggcaatgaggtttccaaaatctcatctaaatactctccaatctattagcaaaaatcagagtaaaatacagaggaaaggcactgctttctgttaattgatttaacatgcatgaattagctccctctgagttccaggcactatgctgagagtacaaagaagacacaagtctgctttcaagcaactcactgtgaaagtgtttttgaagggaggaacagaaatgagacccctatctttccctataaaaacaacatttttactgtcttttgcctgccaatctgtatttgaaaccattggacactgattctctggcctgggactttggcattgatggttttctgcctttcttctcagcctctgcctctattgcatttattaaactgcattgtgtgcacctcgcctctggctttactctttgcagatcaccacagggggaaactcagctctgtgagctcactattagtcagccaaaagccaaattgaacttatgggtcacactgcactttcctgagccccaagcctacagaggccctgccttggagacccagcctcgggtttcctgctgcctctgctgatgccgctgttacagcaagagcaacagcagcacctgcagcgtggccagtgacctctgctactgccacccaggaaggccacagccttttccaggagcactgctcaggtgcagagccctagcaacccattattgtggttctctcagcacctatgtggagcatcaagtcgggggttatgaggttacaagtgaaagagtgactgtcgccaacaactccacttgccatccccgacagcaaactcccccatcatgtctactacaccttgtatgtgtaaggaatgctgatttccaaaacattcacgagttaccttgtgtaatattagggtgtttcctctgaagttgttaggaacaaaaagatcatattctcatttttcagataaaacaaaaatgccctctcctcaaaaaagtatgtatcatgtccagagtcattcagtgaggcagggatattgctgggagcagaaccaaggtctcaagattttcagcccaaagttcctgctataagaacatactgcatccccaaatgaggacaagatgtcaaagtgagtatcagctagaatgaacttcaggattgtcccatatttagcatataaatgagccaccctctagcccactatgccagaaacaaaaaaaatcctggcatatcacaggaccatgaatttcccacaccaaaaggagcctccagggaagatttaaggcaagagccaggagggattatggctgccttctgatctggggccatgatatgtgaactgtgagatggacatgtgtcacactcagtaggcattagaacagaagccccagaaagccaagccacatgcccaaggtctttggctccctcatcccctgttctttccattgttctatacagtggctactcttgtccactgtttctgaagagcacataaactgctgcccaaaccactcactgatagagccacctagggtacagctgcagaagagagccctggaagtgtaacgctgcatctctgggcctgtcattatccaggtatacgactttgagaatgtccaccatgtctctggactgcagtgtagtttctataaaataacatgtaaggcctcttctatttctaagattatatctaataactctaatagttctattaaggcagataattcaagagaagaggaaggagggactgattcccagggactgagggtgtgtatctatttcaacatcacatagtcagtttgccccagaggaaattttctctgccggagacaccactgagcttcaaactcagggacttggcagctggaattctggaagtcacaactttccaggagtgcctcagtgctctgcagtgaaaaaaaagaaaatgttctccaaataaaataagtaaaatggaggtgtcaaagaacatcaaggagaaggtggctggatataaaaagatgcgggaaaaaaaaagtaaattggtgaaaagtcttttaagtaaataactttgtgtctaacttaattttttttttttttttgagacagaatctcgctctgtcacccaggctggaatgcagtggcaccacctcggctcactgcaacctctgcctcctgggttcaagcgattcttgtgcctcagcctcccgagtagccgggactacgggcgcgagccaccacgcccggctaattcttgtatttttagtagagacgggtcttcgccatgttggccaagctggtcttgaactcctggcctcaagtgatctgcccgcctcagcctcccaaagtgttgcaattattggcatgagccaccacatctggccctaatttaattctgcaatgaaaacagatcaattcataataatggataaatggtggtggtgactaaaataaagacacggctgacggcctcgccttagatgggccctttacctgcacctgaacctgcatcctgaaacactcacagaaaatgcagcacaggcttgtcaagcccctttctgtatcgggacgaccagggcaccaggggcacgaagacagcgctctgtaaacatgcagttctcctttgcctaccaggagtcattcaggtggcaagggccccgtgagtcagaagtggggagatactctgcttctctgaagccagggtgctcccctggatctgaccaggccatttatttctcagaagacactttaggtcacttctaaaggccaggctggaacccaaaatggctaagagaaggatgccaagtcccagacatgacctgccctaagaggcagctctgctgagctgtgccccaggagtttgtgttatgacttcctgggcacctgcatcatagtgctaaaggcacagtagtaagtggcactgtcttcagtccttactggagagatcaccaagtgaaaggctttctgggtcagaatgtgtttcacagaaaaccgtccttgagtaaaatctgcaccttctgatctgctgttatccccataaaagacaaactgaaaggaataatctggccttatccggtaccagaataaatctggatttgaatatacagtgtcgtaagtgcagagcagtaccacctcactgccactcgccaccgtctggtccggggaactctgggttactttgtcacacagcgtgcccctgtctgggaaaaagacaatgaggaaatagtgaattctgcaccccccagacagtgagtacagcacatgcctagcccagaagaactcaatgagcagaggcaagagaaggacacagaaataaagccaaaggcagcaaataaccaaaaaccaagagtgcaagagaaaaagccttcaagagtcagagaaggagaaatggggttatagagcaagtggaatgtaaacaaatgaaactacttacagaaaaacaaaaagctaaagcccacagtaagaatcatcttttcttcatatcagggcagaggatatacaacaaaacagggttcctaagatctcagagactatctgacggttctaatgaaagaagacgggaggaaaacaagaggagactggcagcgctgacggtcatgtgactgattcagctgtgacttctagaggcaaatgcgctcagccaaggaaactgctattgctattatgattttggccccaatccatcttgaactaacacatatgacaatgaaaaatggattacttttaaaaaagaaaagaaaagaaaaacaaaggaagggagagagagaggaagtgagggaggaaagaaaactgcaagactaatgatggcgttcttggatatccaactgctacaaaagtagttcactctccatttctgtatcctctggtcacagactggtgtactagtccattaatcacatgtcgtactttgagtgacactgtctcatagcatctagcacggctccacacactttgttctattcaataaatggaataagtgaaagagtaccttggacaactcccttactcctctgtgtaaagaggaaggaaagggggttggaccagattctttctaaaatctgtcctagacctgaattccagaaatctttgatttcagatgcttgagggagtgtcctgatcctaagtgcttcttgcacttcaccagcttgactttccatctctcactgggcccactgcagcacacacttggctccagctggaaaatcctgaacagagcttcccggcaggtgaactgccataagtgggttataagcttgctgagatagtgttcagagtgcccatgtacctggggtggctggagcccctgagccagcccctcccagtcaggagcactacaaatacagttttccatgtaagccatcaatatgacaacagttgggaggcactgctgtgaaaaacagaacactgactaactcactccccaaaatgcaggagtgttcctaggagtatttctagaaggtccttcatttccctttttccctacatccacttcatcagtaagacctgtcagttctaccatgaaaatatatctccaatccatctacttcttccatctccactgcaaccaccttctataaacaccatcatctcttacagggactgcttcaataacccactaactggcccccttgcttctgctcttgtccctggacaatccattctccagttcttcataaaatgtacatcagatgatgacagctggacctccttcccaggcctgtaacatctgcaaacgatctggcccttgcttcctccccagcctcacctcacatctgctccttctctttcttcccttcagctgcagtggccttccttctcgtcctttctatgtctctcttttctagctacctgaaactctgtctccaatttttcacagttctcagctccaactaaattagtcacccatgccacccataaccaacctcaattacatctctgttcttattttccctcacatcactatctgaaatcatcagattcatacatgtttattttatgtctctcccatctcacctctcccctacacacacacacacacacacacacacacacacacacacacacacacacacacgataatataaactatatgagggcagggagcttatcttttcactgatatgtctccagcccctgggcttgtgttgaccgcatcacagacaatcagtaaatatctgtgtaaaaaaaaggaatgcaatttcttcacttaaaaactcaccattcacctagatttaggaaataaaaatacaagacacccagttaaatgtgcatttcaaataaacaacaaaaatttcagtaatacgggtagctgggacatgccatatttggaacacatttatactaaaaaagtattcattgtttatctgaaattcaaattccactgggcatcctgtgttttatctggcaatgctaggcatgcagaataccaaaagtaagcaccaggcaggccagagtcccaccatgagcatcttcagggcccctggatgtggaagagggatgttgagggcccaggggctgccttgccggtgcattggctgcccaggcctgcactgccgcctgccggcaggggtccagtccacgagacccagctccctgctggcggaagtccatttcagagcttccggttctcccaagtccaaggattatgctcactccccacccacagtctcttagtgtctgtccctgctctaaagatgttgtctgggcttgatattaatatgagagctgactgttcccttcctgatctagaccataaccatcttcaagttaaattgctcctcctcttctaactgcccaacctcacccacgtctgaccatacccaagcacagagaagtgggtttaatggaccttcacacagaaggacacatcctctcctataatgctttacatggaaggttcagacataacctgagtcctgcttggggtagcatcatcatgactctcttgccctggtgtccttgcaatattccttgaaaggcatccctcccccaaggaagggcaggcactgagcacagcaatgcagtataatggctaagagtgggatcccggagccagcctgcttgggttcacatcagctccggcttttaccagttgtgtgaccttaagcatgccctaactctccaagtctcaattgctccatctgcaaaatggagatagtaatagcttttctcacaggactattggaaaatttagtgaggtcacacatgcaatacacccagcagataaatgatctatgaatgtcaggtattgctgttgcatatttaatttaaatgttgccatttttattaaatagacatatgaatagagttcctaagagtgttactctcatcaatgctgctcagggaaaagatgctgagtaaatctaaattttaaagttgcaaaatctagcaaaagattgttgatatgttgtatcaatcaatggttaaaaaaaaaagactgacatctttaatttgctttcagtgctgcaagcatgtcctagagctccgtgatcccctgagacctgtgatcctctgagacatgagccagctgtgctctccccaagtccctaagagcattaggagcatgagaagtgagcattccagccccttgttcttatgtcttccaaacattgtaacaggcttgttcatgagaggccacaatgcatgatcaagtgaccccaccactgaggaataggagaaagcctcaagattcagtggcccactaaggacgtattgccctaagtttctccaacccatcttcctattggcatctggagactatgcctcttcccaaggtgctgagggtgctgcagaccccacttgccctgcaggccccacccgcccaccagcgaagaagggctgcctttcattagcccaaaactgccactcaagaggggtcctcagacaaggtgggagccaagagatttggcgaacgtcacccttgtcccacagcttggatcttgatcactcatatcactcagaagagggacttttctctcttgtttcctttgaggtgggcggctttgtttttgacattgtagcgccctctgctgctactaattatcgcatctccataaataggtcatactggaggttgatagaaaatagatcagggaaggaaaacattctttgttcacaattcaagtcaaagctgctgcttctgtctccattcccttttcaactctgagactggcagctgcttctctgttggcccaaagggactatcctccaccagtcacccaaagaggactgtctttaaggatatgagatagcaccctaagaggataaatggacattttcttgtctacaaaaagcctaatgcaacagtagaggacatagggaaatttctttggatggatagagacaagtgcatctctttcttacgaaagaatagaaatgtgattaaaaaggaaaagcctagaaacatctgaacgtgtggaaatgggggtgagtgggctagagaaaggatttctgcatcactttcttcctgtagcaattccatccgagatccctgggacagacctggcctgatgaatagcaggaagcacaccagggagggacaaggtcctgcagacaaccttcaccaccaggctgggacagcgccatggggacccagggcctctgctttggggaaagaccttgctgagggccccatgggcaagaacaagtgtgaagaaccctactatggttttttgcccaatgccctccacaaagccagcgtttgaaggaaaactgtgaggaagaagggacactccatggtgttgttgttgccaccgctggagcagcctgtagcaagaacagtcttggtccaaccaggtcagtgatactttttatgatggggctgtgtgggacctgacctgactcttgctaaccagatttctaaagccatctgcagggtcttttctcctattattccccagggcagggagggcaaacagattatatctccattatcaagagctaacaattggtagagactatgcggagcatgctggtaagaaagattctgaggccacatctatactcagaggaagagagtgatgtgtttattagcaatatttaccaagggagcagaagcaggaggcaaccccacaccattttgtatttcccattcctgctctcgatgtcattccctgaaatgagtcctgcagagaaagaataatcagagccaattctccattggattgtccttttggtaaagggcaaatttttccatttctgtcttttccatggaccatttcccctgctatcaattgctgttgcctgcagcctaagaaataaaatttttaaataaatgagaacgttctataattctctctaaaatcataaacaatgtgtcaaggccaaacacttccctggtgtgatttattcctatgtggactcatccttgtataattagcaggaataatcacaccctgagccagctggcagagcccctggggacagagaccacccaaagaaggtccttgttctcctgagtcacataaagggagtcacacaaggcgggagtggaactcaggtgtccggagttctagtcccagctctgcttctacctatctacatgaccttgagcaaatttatcccgcagagcttcagcattttcatctctaaaatgagggcattggcccaggcagctgttaaatttccttccaagtctcacattctaggatgctaatgtgtaaaattatagaactgacccaagagttattagttcatatccccctgtgcatgttgcttgaactcctcattgcccagcaggaggaaaagggaaaacatgtttcttcattggggggtagcataatttcctggttgactatgtgtgactcatcagagcctggcggtccaagcccatatgccatttgaaatccggttattattacatctgggagagagaaaagtgctgaaaacagcctttgggacactatcgatttggccaaaaaaaaaagaagaagaagaagaaggctctgtctagtgtgataacattttgttatcttattcattgtcttcatccctgaaatacactctgctctctcctatctctgctctgaaaggcagaaagagggcagccctctccaaggcaaaatggggctcctgtggggaacagaggggtgcctctgtcaacaaaggtgatgccacatccctttcaaccatgctgacacctctggtttttgtaaaggtgcccactcctgtgggtaccgggttaataggaaactgacatttggagccaacactagaggaatcatgaaactcagcaagtaatatttggcagaatttttttttctatctgaaaattatcagtgagagattctaatgtgccttaacaaacaggaacaaaagatgagtgtttaatacaattcaatttaacaaatatttattaagagcctacagttattcccatggatcatctgagtcagtttccgaggaaacattatcgttgccttaagggagctggggggttgtcaacgggccagaggtgggatgaaaaatgacaacagatttacctctgggaccgggacatggttaaccacagcggccctgggtaagtagcttagcttcagaagaaaatgtgcccaacagcatgggtaacctaaaacaccgggcaatccaaatattcttttatgattggctttagcatgtattttattcttttgtagggcaggtttatctcaccaattatatattttcttaactgacctgtaaaatctacaggggaaaagtattttaagaattatatgtttctgcaattaggctcccagcagtcaacaaagaagtggtactttttgtctttccagtgatgaaaaagggaacctggcatccctggtggcccaccagcgtctccttccctggcctaggtcagaacaagccgtaaatcagcaggccgttatcttcttataaatctgtagagcagggtggacaacaaaaggcagcctgctaggttttcagaacatgagttccttgtgtagccagagaacctgggaccatcctgacgtggctggtcctgctgtcctcacagcctgaatcccaggctgtatgaataggagaggttcaagtccagatgactgttcacgatgctggtcccccttgcatccctaatcatgctagagacatgaccagggtctgagaggaggaagttacagcacagcaccaacaggggcttttggtaaagggcctgggcactatgtgaagatcacctagatgctcaactttgggaaggggactgagttaattgtgagcctgggtgagtacctcaactccagaggtagctttagcggaacccctctatacctaacacctggcaatcagagggctgaaacacttggccagataatgaattctcttatccggtgggaaaaggctgtaaagatcaaaccacctttcctatgggtaagcaagagtctgtagtttatgtaaaggcagcagctcctgtgggaaggaaggaaacaggaaatttacatttggaatggggacgcaagtgagagtgaagctatctttaaaccaaaggtgtcaggttatttggtttggtttttgaattatctggaagttccaaagaaagaacacttctccctgaggatttgattgcaaaattctgacttcaaacttctaaaaagatcaaatgttaaatcagatagtaggcttggaaaactctatttctctatgtaaaaagtagagaactacttttcttttgtttgatcattttattttgtttaggaaataagaggattagataccctggtggtgagtggggagggcagggacatttgcacagcatttctggataaattagatccaaataatcaaatcaaagactctcagctcagaaagtaattaaagatctcctcacccacctctttaattttgcaaatgaagacagtgaaactcagagaggttatgaacttgctcaaggtcacacaactgatcctgatatcaaggtccagggcaaagccaagacagctcatagttctcaccagcccagacccaagggagaaaaaaacatcatagtccttggccacggcagcatcatttgcatcccaaacattctttacccaagacttaatgaactcaaaaagaaatcctgagttccaaagggaaataaaatcattctgcgtctgttgaaaaaaaaagcaagctaaagtggaacaataattgaacttgatattaggggaaaggtgcagccatctgcagactgagagaagggtgaaaaaaacaaaatgaaaatgctagtcttgtgttcagacaatgattatgaccatagaacactacctataagttctgtagagctaatttctttcccagtgggttgatattctatgatagattgcatcagcggtgtgattgttttggaccatagaatacgtatacagaattggcttgttgagccttctggtgtcttgaagtgaaaatcatatctctggacatatctgtcaggcctgaagccctaggctactggaaagaaagataccatgacttatccttcctctaaagcttagaagttggagaaaaattctagttcttgggaagctctgcaaagcagggttcgttaagctgatgccacaggtttttgcaaagcccctcagcacagtgtttaagaaaccagtggctctaggttgacctttggggaaggaacacagctcacagtgaatcctggtaagtggaggggagcattgaatcctctgcctgaatgtatccattttatgccaatgaattgagatatggcttcttgccccatctctgccacattcaagtcctgcttggctaaacaatgctcacggatgtgcacgtgtgcagtgggatgcagctttttctaacctctcacaaaatcacgcaaccccttcaccaaactgcttggtggctcttctgtgccctcacagcccttctagtttagcagttagaggaagacaagtgcccaagggctttctcatttttaggtcattgtggaaagaggaacgttggtgatatgtttgcctgcttgggaggaaaataataatgatgatttactcattggtttctatatgctagttgatgtgctgcattctttctcttatcacatttaatccttataccaggtctgtgagttaggtgctattattatcctcattttatagaagagatatatttatattttatatttctatagaagcacagagatgttgaataacttgttcaagccgatgaagtaagaaagagaacctggagtttaattcttggcactcagattccagagctaaaagcttttcagtgaggggattatgtctagagggaatgtccctgatgctctagtctctaaggttgctaagataatcgctaaagaactgcgctctcagcaagtaaagccaggggttggtcaacaggaccacggtgacccagttacatattcttaatccttacaacatcatcaagcagttgctgttttccccactttacaagtgaggaaactgaggtgtagcaagttaggaaacttgtcctgagttttaaactcaagcctacctgccccaaagcctgagctcttttaaattaactgcaactgctgaccagttagattaactaattacttaattaataagataacaacctaacaggctgtaaggtaaaaaagtaatcagatttgttctataggtcccctcccttttcgggaatagctatacaattgtataattttatgcttcccctgggagagtgggtggagccctggctcccagcccgtgatggaagggtcttggcagtatttgtaaagcagtctgtgggggtgtaactcagggcggatctgaaaagctggtctttggaaagggaacgaaactgacagtaaacccatgtaagtctgaataatgcttccaaatttctccctggaaccctgatttccaaattttccattctgttttataacccaggtccaaaccacagcagtcccattaatggattccagtgcaaaacaactgctggtgtattcctactacacgcaggtctctgttgtttgccctcatgtgctattttatctaatagctgagaatgacagtaccaatggagcactgagttaaggagtcagactgttcgaaggcttcattcttcgttataattggtgagattttccatgggactaagagaaaattgattaactctctgagcctctattttcctcctctgtagaatgggggaggcagttcctgttcccattttaccacagccggcgtgctgtgaggggatgttggtacatttccaataaggggacaatgagtgtgaagagaaaggaaggccccaggtggtccgtaaactcttccaccagtcccacactataaacagctggttttatcagggggattcttggatgacaagtaagcacttaagtaaatatcaaggggagtttgggcaactgagtttttgtagatcctcgtgtcattgtgttatactggagccaatagtaagctgacatttggaaaaggaataactctgagtgttagaccaggtatgttttaatgaatgttatttgtttccaaacataagccaccatccttagaaattcagtgaaagataaccgaatctcctgcccagttattagcatctttcaccatgggtctttctggagaaaatgacaatgtgggcagcccctgactgcagcccctttgggactgtttctttaacacctttaagtacttgggaatgttcagtgtgtttttgttaatgttggagatatgtgtctgacaaatggaatctgaattgaagttttagtgtgtaggggcagaaagcatttagaaaggacaaaagaaggacagattagactaaaatacataccaatggctgggagtatgcaatgcaacccaatccaaaaggaaacagtgagatgtagcctgctgattaaacaactgagccagcactccgtgtcagctgacttgtcttcccaaagcttccatgttggtgcaattaggaaaagaattgtctaatccccataactcaaaatcttggagccaagctaaattgggtaaagccgtgtaagattttctggtactgacactgactacaagctgatatttagggaaaagttaagattgaaagcaaatattcaaattagtcagaaagaccacgaacttctgaaaacaagccccagggtgctgttaactgctgcatttctaattgggtcctcatggaacattttcatctctgccttgtctgagctttctgcaccagagaagccccttttgatacccactcacttctgagtccctcattgaaaaggtggcaactaagcttagagaaggattccctaatccaaatgcaatacttgggggaatattttgagtattgctccaccattctcaaaacaaacctaatttcagttaacttgaatgtagctgaaattttgttccatgagggaatctctgctttctatgataatgcaagctcatttcaaacaattgtttgggatttaacttttgctcataattcccaaaagataccaactattcaatgagtatcttaaaataaaactacttttatgaccaaattattatccccattagaatggctagaatcagaatgtcctagtatgtattatgtgaaccccatgcgaccttcctaaagtttcttatgcctaaaacagcataagagagaaaagcatttccacgctaacctgtgtgttcactggttaacaaaggtctaaagagcaggtgagtcagctgctccatttccaaactggactggacatttacagtcctgcagatactaaaaatgataatcaggaaaagcacacacaattctactttttcttataattcccatctttcccaaagaactgttataaattctctcccaaaggtgttatattcatccttcttttgttgcctctatttgtgatgtgtactgaggtgaaatatttgttgagattcaaaaaccccatgagatttaacttaagctttccctgtcagagagattctaagagctaaaagatgggaagctggtatttgggaactagattaaaaagaaaatccaaattaatcccaaggagcaaggctcaatagatagttatttagacataacatgtccaccctgcaagcctagttgctcagttgactgggctgcccctatcttagtcttgcctggaagagaaataagttgtttgccccatacctgtcttgagaaatgtcagcctccagacctgaaagcttcttgtgatttggtttatttctgtagagtttattattatacacagtgttcttgaagtaatagagaagtgcattagaagctcctgcaaatggaaatgaaatgtaaatttagattgtaaatacatgactgcggtaaatagatagcaagaaaaaggatgaagagattagaaatttgccacatttctctaaccctaaagggatgtttctataaatagtttaaaactgtagaagacgaagggggaggaggaaggagaacagaggcaaacagattttctcctaatcctttccatttggcaaaattagaaatggtttttcaattaaatttccctgagcagaggaagaaaccatgtctgtttccacactaaaattcctgtgggtgggagtctctagagttgatttggaggatggatccctgttagtgacaagtgctggtaatgctcctgttggggaaaggggatgagtacaaaaataaatccaagtaagtgtggagggacaagaagatctcacagtgcaggatttcccctggattttctgcattgccttttcacctttcctgtcttagcacgacaaattaggtcccagatgagcaggccctcgcattcaaaccggaaattttaaggaggaagccagattaactttactcgggagacctagtagactctgactttaaagattcttttaatccagctgtttttagggagagctctgtaaaagatgaaagaaatgttttaaaaaaaaattaaaattctgtggggtgaaaacaaagatgttaaatatttgattggcaaggcaactggaaaatctggaccatgtctacaactgctaaaggaggctttgtgaaagagaaaatgagcagcccaaggagatcctgtcctaaacttctctggccagtgaaattcgggccattctctgccacagccctggactgctaggagggcagatcatatgtcttcctcagtggggagaggtgggccctcgctggcagtttctgtaaagcctcgtgctgtggtgtaattcagggagcccagaagctggtatttggccaaggaaccaggctgactatcaacccaagtaagtatgacagggtgaagctacatgcagctgagtacagtcttttcctttctagaccgtgtcctgcaagctctccttgagggacgtatactcattttgcattgtcctttgtagagaagcagaccaggaaagacaggaaagccctcaaatttccacttttaaacacctccctgtaaaaactgtctcgcttccctccccttctacaatcagtttctagtaaatcagaatccggtgaattgatatgcaatttcaacgaaaaaaaaagcagagaaatagttaccccaacaagtgcaaaaagtagaaactatctgagtaccagccaagggaagataattaggaaagaaaaaaaaagaaagaaatggattactggaaccatgatggcagcttagtcacaaagaaaatgataaaaaaaaattaaaattaaatttcaaaaactttaaagatatatacatatatatatatctatatatatatgatatattgtcctctggaactccagcactcacctacagcagctgcattctggacttattatcaaataacctataaacctgtagcttaatgaagagttgagcaatcgtgactatattgacccccaggacccttctgcaaagagcagcttctgttcctgtttctgtaaagccttctgtggctgtgagaatagtggaggtagcaactataaactgacatttggaaaaggaactctcttaaccgtgaatccaagtaagtttgaagggagtgggggaaggggggattcaaacacttctgatttaattacttgcccctccaaaacattccagcttaggttccaaatctaatgtttgtgctggggggatatggtgcccatcagagggattagaactccactgtacaaagactaaattactttcagcccaaaacattcctatcattcatcttaaacaagattattggtgcaaggagaaaaactgaatacagaatcctgagggatccagctaagggtcaggaaatgtttgccgaaaagataaagaggaaattggcatatcgtgactacgcaaatgcagtagaccaaatataaattgtcctgacttagatactaacactcctcttaaatttatcgcctgaaataatggaaccctgcaacttcattaactaatgctgaaaattctataagcaggctccttttcttcttttaccttcactttacctctctgaaaagaactgttctcaatccccagtctggtaactgaggtccagtcagttaactgtctggttaactcaggcagagcatttaaccccactttttccttggttaccaaaatagtggattcagcctccactttacttagttcacctgagaaggggaaaattcatctgtcctctgagtcgtgagaatagagcagtacattctctccttcaaatatacacccacccttccctaatggtaatgtgtgagtacttagaaaagtttttaaatgttagatataaaagtaaggcacagtggttgctaatggcacttcttgaaaatctgcgctgctggtggacttctgaaagtggtgcttataaactaaggctggagaagactgacttgtaaaattcagataaaatgaaaatgggaaaaacttatcaaagggccccggtctcctaagtgccctgatgttgagtaaaggccaaatgccccagttttacttactcagatctgctttctgtgattaagaagagatgcacactagagagaggcactttgaaaaacacagcccaggcaaaattcttaaaaagactggctctggtggcggggcgggtggtgaaggactcagggacaccgtgcatgcagcattgagggagttaatgcagacttgctagcagacagcttggaacgttctgggataggccctgcctgaagaacatgcagtgtggttagccatcaagttcccatgtgcagaagtgccttgctcagcaggggcaaaatcagcacgtctgtggcaacagcaacaatgaataatatatgatgttaaatcccaggggttccgcagtctccactgaggtcttatcaaattaaagcttcaaggggattcatatgaacatcccaggagactcaaggactcagtcgcttttcagagggtgggcagccaatgctagggaccagacagtaggcttttttctttggtttcttaccggaagcacactagggcggggctctgcagtgggttttccagaatgcagagaagctgggagcccctctcagcacttggtcagcctcttaggggactgagaactgtaacaactcctaccctttaaaacattgacgaggtcagggtgtttgacagcctaaccaggcaaagaaaatatctgtgcaaggctagcattcttccagagctctggacagtaatcgtatgccagattttccatgcagtggactctagctgcaggaactatatggcaaggctggagtccaaggaacccatgattaaattctgttttcctgcagtaagtggaacacagagattattgccacagcaacactttgggtgcctgtctgtttgagggcctcagctgagggcaggcatctggttttgcttatgtcctgcggaggctgaagagagggtgggaagccctttagacagtgaatactgtgaaatagtgaagagatgggaagggtcgtttgaatccctgactgctgtccttaaaaaaaatggatacgtcttcttagctaaataatagcctttttctctcacccttttcatgatagtaagcaagctaaaactttaaccctttgtaacaagtggttgcttgaagacatgactaaacaggctagcataaattcagcccaaaaaaagtctgagttaagaaaactaaattctattaaagaggtgtctgtttttcacacccctggggacagggtttgatcatcaccacatcatgaaactgcctggattttgctcttcacattttttgtgacatccagacacagccagggtgactcccaggattcctgtggttgtgtctgttggcaacagaagcattatttggtcaagggatgaaatttacaggaaccccaagtaaatgtgcaaaagcctgcccctaatagagacctcacttaaccctaccactgtggtcaccgggctgctctgtgaggtcagaacacctcaggtgagactgtggagtaaccagatgccctggttttcctgggtttcaggggttttccaggacaaaggtcattctttgctaagcccagaatgatccccaggatagttaatcaccgtaagaaggcacagataaaaacttttttctgtgagctactacttacatttcaccaaattcaagactgacaaaaaaactacgttgtgtgaaagctcagttacatgtgcccatcatttttatttcttatgctagggcatgaagggaagctcaggagatcctgtttcatgaggctacagtctaaatctcatctaattctagtcagtctccaaaaagctgaacactctcctcttgtctccttgtaatcaattcattgtcatcagaaatgtgtgacacctcgaggggaggggaggacgtgtcttgaaaactgatcagagaaattgtcctgaaaatgatgctgtaaaatggaaatgagacctttagaaagagagatgctgaacatgagaaatcagtaagcctcaagacaaaaaccagaggaaatggagagagatgggaggcaggaagccggacctcgggggacgcagcaggtcagtgtcccaggaccagaggtggaaatggtcttccagcctttggtgggatgaaactgagcctcacagacccaggcccctttgggtgagtttattctccccagaattaaaagaggaggaagtctgcgagcttcagaagtccccctagggttcttgtaaaggcctccagtgcagtgctaatgctggtggtactagctatggaaagctgacatttggacaagggaccatcttgactgtccatccaagtaagtgtaacaagacacagcagtatactggaaattctggaatgtcaccccagtgtcaggttttaaagaaccagatattgcttaaagttaagtggtgtcctctgaggtcctttctcttctttaacctcaatattcacagattttcttttggaccctgagttgttaggtctgtctccctgctgcgtgtacagctgaccttgaccctggaaagtcagaatctttcctgctttcagtgtcttctctggaggtgatgccctaacttttttgagggggaggtcatcctttccaaatgactcccctgagtaacctgttctaatgtttagtagcattccctgtcagaagtccttccttacctcaatcttaaattattcttggtatagccgaggccgtttccaccagcatcatccacaataaagaggaaaattgagagcggagtttgaataggtatgtggtatttggttcagaatgggttttaaatgaaagtggagagggaaaaaatgaaacctgaatgggaatctgaggtcttatttcaaatccctctctgtttcctgtctgtcatctccttttgcttctatagatgcaaaactacagagagagaggcggggagagaaaggatagacagaaataaacatccactgtgtccattccctgtcactgaaaccaccaggcaagggattacaattaattccaaagagtttcagatacacggcttaatacctttctccttgtggtgacttgtatcctggctgataattagagcagatagaaagatttggctttggtgtgtttgccgctgcaccccgctgggaagagacagaaacttgactgttttttaagattcataaagttccttctgtcagtcgtcgtaaaactccctgaagcagggagatgcgtgacagctatgagaagctgatatttggaaaggagacatgactaactgtgaagccaagcaagctggaaagacctaaactcacagtgttccttatgtacttttgctcccttccccgtttcaggccttttggctgtttcctgtagggattctaagagagtcaaatggaaatggattgaagagagtctgaagccccgtgggtgctcagaaatgataaatgaaaggaataagagacagaaagggaaacaaagttgaaaagcaggaatatgtctttcactgcagcttgataagactgagatgtgaggtgggtgtcagagaagggcatgatcgctccagctgctattgcagaacactctgttttcctaggatctctatcaagggcagtgtcctcttatgccaaagggatgagtcaagtccctatatttctggagtagctgcccttgtgcaggcatagttggtcaggcagacagcacaatcccagctcagtgtgtatggaggaggccacctgacattgccagctgtatctgctccattcagtggcagcataaatccataccaggtgggtgtggatttggaatatgccagtgccactacaaggctgaatgttgagttgttgtgatcatcttgaatgtgtgagatgcctccaagtgaagtctggttctaatgagcagggtgcaggttggaccaatattgcccattttctgttgagtttctccaagcccagtagtgtgggagccaacattgagagactgacatttgagctagggatcctattgactgaaatatgccaaagggatctgaaaggtcaaaactgccttcagagctcagcctttgttgttatctctctggcagttgtcatttcagcaaaatgcatccacttagaaagctcagctcttcattaggcagacaaatgagaacaacatattgaccagagataaggagttgggagcccagatctcagcctctgagagcctggcatttccagttctttaatcacgtgagccagtgagcatatgctatctcagagaaagcagatcaatggtgcctgaggacctggtgtcaccaagctagggcttagagacagaaatgagatgcagatggggatgttgtgtgaattggggaataatagagaagtgaggaggagacagggagttcaatgatgctttttaaaaccagcagcatgtgagaaattgtaatgacacaaaggtgaagaagtatgtattgcatataatcctagcaagtttcctaccattcccaacagaatctagcctcactgtggctccaactcacagatcctataggtaatgctgaatcgtacctgagatgccttttgaagtggcatcaagactgggctctaaaatctttaagagtcacctgtcagttattgtaaaggtttggatggctgtgtgaaaacctcctacgacaaggtgatatttgggccagggacaagcttatcagtcattccaagtaagtgtccctggggtgctgcctgtggagtgcgctggggctaacagtctcatacattagggcttaaatgactgtgcagatggcatcgtggttgaggacacaaaactgagagaatcgagatacattgactctgatcagaaaaaaaggtcacggaatagcaaacataggtttagtccttaaaaggtagcatagataacatgggacttgaacgtggcaatttgaaaaacaacctgtggtctatcagcacgttctcactgcacacgggggataaacaggggtgggggaataagcaatggacattgcatgataggggtgctagggaaatgaggcaggtcaggaagaaggaaggtgatcagagcctcatacggagttaatctagagaagatgaattgttccataagtttcacaaagaaataaagtccaaagatataataagaagtcctgattaaaatccacttcagaatcatatgatcatcaggagagaaattaagtcttaaaagaaaaagaagtttttaaatgtaggtccataaaacaaatggacctacacctttaattagacagcaagcagcacaagatgcacgttagccttccttttaatcccctctcaggaggaatcagtctctccagctgcacatggtcacagctgctctaagccctggagctccttcccagtaatacccttgctcctgtgcctgcacagggaaaggagatgcctgcctgcctgcctgcctgcctgcctaccggtctgccttttggtccgccgcttggtggggccccaggtgtaacctctggctgtctcttctgcctggtttttgttgagcttcctatcacagtggaacaccggtaaccagttctattttgggacagggacaagtttgacggtcattccaagtaagtcaaagaaaattttccatcaccattgtgttgagcaaaccctttaaactgcagaaagagctgtcaaagtctgctactctatttctctgcttctaggtataactttatctggaccagagtaaagaggcccccgacccaccccgagaatgatttatgcttggacaggtctttatttcattccttgaactatctatctgtctatctatctatccagctatctatgtatctatctatctatcatctatctcagaaatagttgtttttaacagttgattctgtgcctcacccaaattgtcattaactaaatgcagatgtgctgccacactgataaacttcattggaaaaaaagaaaaaaccaaacccagagaatgttccttgaacattcctgaagtgggggggcaggcgatgtcacttgcagtgacagctggcctctctagctcacccccacatctgtgccaaccagagaagctgggccctttgtagcacaagcctcaggagcagagaatggagggacattctcaactgagaggagagggactaggaggctagatgggaaatgaggtgactctacagaaaatcgaatatgggatggtataaaaggatgagaaagatggcagggggtccacgatcgctcttgtatttagacctgggggatgcactgatagataccacctggagagagaaagaggatttctgtttccctctgaagaaaaatgtggcagaaaaatcaaaacagatcgcacatgtcaagcctctcctaattacagcctttcattctggtttctctcagctgttccagcaggaaatggtaggaaagggtcattggtgcctttgatgttgtggaagcattgcaggaaggagatttgcaagaaacggggcaggggcttgcagtagagtctggagagtttagaatgatggtttttgcaatgacttagaacactgtgtatctaactttggaaatgagaaattaacctttgggactggaacaagactcaccatcatacccagtaagttcttcatccttggtcaggaaatcagcctgcataagattctggggatcatagtagacatgcaggcttagagaattttcatctgtccttgttcataactggtagagacaggtggcagccaaatatctgagttttccgggggaactccagtcctgactatttaattcaaaactagaaaatatgattcacaattctgtttttgctgctgccgtcaagtgctaatgtggcatgtgaagagaattcaggcagaatgactgcatcttcactttcatcttgtgtgataattttagctttgagtactgcaagtgtttgggagaaatggtagaaacatagaatatcaaagagacaagcaaaccaagagacccagagaggcaggcagacggaacgtcaggcagtataattttacaaaactaattcagtgttgtgtctctctctgcaaatggcaaggtatcgggaaaggtgctaagagctagtgctccgggtggggcaggattatctaaatagaaaactaagcactgatctcagggggaaagtttaaacttggaaatctctgggtttggttttttgtttttttccaatgaagtttatcagtgtggcagcacatctgcatttaattaatgacaatttgggtgaggcacagaattaactgttaaaaacaactatttctatgcagccataaaaaatgatgagttcatgtcctttgtagggacatggatgaaactagaaatcatcattctcagtaaactatcgcaagaacaaaaaaccaaacaccgcatattctcactcataggtgggaattgaacaatgagatcacatggacacaggaaggggaacatcacactctggggactgttgcggggtggggggagtggggagggatagcattgggagatatacctaatgctaaatgacgagttagtgggtgcagcacaccagcatggcacatgtatacatatgtaactaacctgcacaatgtgcataagtaccctaaaacttaaagtataataataaaaaaaaacaactatttctgagatagataaatgatagagagagggagatactggatatatatacacagttaatgacaatttgggtgaggcacggaattaactgttaaaaacaacatttctgagatagagagaaagagagagatactggatatatatacacagggtagaagaatgtagagagaaacatgggcaaatatattcttttgcacctacaattaaaagctgtggaaaatttgaatatgttcactttgtaaccaaagacaaccacacaaaatggaacggaaagcatgcttgcaacagcgagaactggaagtatggaacctttctgtcttaaccactcagttgcctagaagaatcttttttctattttgctgcattagaaattaaaggcatgagtattgaggatttgggtaggtcagacttttatagtgacaatcacattacaaagcacctcttagctaggttggataaagcacctttaaacatcaaagtctttttcttctttctggatgagatagaaaaatggtctctcctcactctgtatctaaggacagggggctcagagagttccagacttacaaagtgagactgcagcagagctgagccatgggacctggagggacccagtgacggttagtctgctccctcccacgggtgctatagtagccacaaccgttcaggaaaccgtccccaggtgagaacgtaacacacgcagggaaaatcccactgctactaagagcaactcagcataagaatgcattacccagcaagggacagtcagaggggctctaaaccagagccccaaatatttgaaaactttatgtggaagccagctataacaagttcgttttccaagccgtgcttccagaagctgttagtggttggtagttgctaagggttttgaaactggaggacatcatagcagagtggaattatttggcacaaggggctatgattagaattaatgagatgaaagaaaattctggctagaagactagaaaaatccggaaagaaaagatacagtaaaccttgggggagttgtagcatttatcctagtccaagcagcaaagagcagacagaagccaaattccaataaacaattggcctttttacttttacaagtttctgcaattatcacaatgtcttcagcttcttgggcaaatatcaacaggtcctaaatgcaaagtggaacagtcctctgtttccagaaccgagtagcttagccccgccccacacaccacccatgctcaaccactgtttttgtagaggagtttgacgctgtgtggaatatggaaacaaactggtctttggcgcaggaaccattctgagagtcaagtcctgtgagtataaaacacactcaagtcccaacctgggtttcattgcatattaaataaactttttctggctgggaagtatttgattctaaagaaaggaaaagtgaaattccaagcgcaacgcaagcatttcattagtgtgattcattaagaatttccatgggttgccttcgagagcgttaatcacatccattcactggtgagacccacagtttgaaaattgagttaaatttgaaaaaaaattgtcaccatctctgtagaccacagtgcttgctgtttgggtgtctagacttccaaaatggaacctcaatctgtagtttcgagcttggagatttatcccgagcccgtgacttagagatgtgtaagaaaagctgcacactgctgggccttgtagggcatttgtgggatcagtgtcatgaaatagcctgggtagacaggttggtgaggagacactggtgacaggtgtctgccctgtttctgtaaagctgctgacagccgtgagaagaaaagcagcggagacaagctgacttttgggaccgggactcgtttagcagttaggcccagtaagtctgagcagaaagtaagatatttatgccttttcctattatttgttctagcctgacatttgagttgtcctcctttggattccagatcaacaaaccatagtgtcttttcatactccttttaatatttgtggctaagggccctccgttcttcccatctgtcctacatgagggtcctgtggccaggtccacattcataaagaagccaacagtgatgcagttggttggcagtgtgtcaagaaactgcagtcatcatctccagggcccttactctggttatgtgtgtttcaagcttttatgccagcaacagaggagagggagaagtgaccagtagcaatgaccagggctattagctgtacctggtgtctgtgggtttcagagcagctgtggaggttacgggaggttcagggcatgagtttttctggcagaggagtttatgtaaagggttggcccagagtgtgtattcaggaggaggtgctgacggactcacctttggcaaagggactcatctaatcatccagccctgtaagtgcttttgcctgggaggtggggttcaaaatgcagtcctcatggggacatttctaaaccttggctcatgtgcttctggtgccactaccatttttggcactatcctacttacatgggaggttttgagccatgtagacaaggaggtgatgcagtttgtgctttggaggactcctgagatctgccctttggcaactgtgtttgagtaggagtccctcattggaaaatctggatgccagcagacaaaagatatgagcttaggatgggtcacaaacaaatggaggccactttgccagcagcacctttgcaacgaaaattgctttcataggaaatgtggaaatggctgtgtagatagagatttggccatttctccttttctgtctttataccctcttctctgcctgacttagggaccttaaattagagcagttattaatcatttgatttctcggccccatcactcatcaagtatgacaagagggattcattaagataaaacccagaaacagaaaggacaaagaattcaattctcaatgtcttcagagttgaacttgacaactcctcagccttaaccatctagtcagcaccccatgaccaactgaggtcaaagagggcaaccagcaggtaatgttagtcaagtgagtatctggccagagccagctgccctcataggaattaatactgtggagtttgggaaagggaaatgcatctgtgagggctcacccaggctgcccatctgggagagatcatggggagagttctgagtgagggagtgaacaccagatggaaagtcaagcaacaggtttctgttatgaagcatctcacagtgtaaataccggcactgccagtaaactcacctttgggactggaacaagacttcaggtcacgctcggtaggtaacagaaaccgtgaggtaacttaactgtgtgttcctttaaaacaggggatactgcagaggggatatcctggctggatgtagtccttccttccttccagtgggaggtgatctcactgaggacacatacctgcattcagtcagttcttgtgctatttttatacctgttacggaggctttcctttccacctgtgaaaacagaacctctctgctccaagcttcttcagtctttattaccctatgtatttcctttagaacagtggtttgggaattaatttatcatcaggactttgtctctgatgatatcactctgggcaacaaaatgaaagggctctcaaatagagaacagagagtcctgaatactcggataacttctccagagtgatatgtgttatgcgtaatgggatgaagtgggctagaatgaccttccaatgactgttttggagacacactaaggaaacttgcttaacatcctatatccttaacttgttagaacattggtgaagtaaagcaaaatcttgaccctctaagaacataaacaaatgccaactcctctcccccaaagcactgccatgtttcattatgtgcaattatgaaacaaatacatgataatttatatgaaattacatagatgagtagtttgagtattttgacccatgagtaagatgcaaattgtagaagttctcaggtagttcttcataaaaagttgtccctgaagacaaatagtgtacctgggcataatttgtttgcagtgttggtttatgcaccatttgggacctgtttgaaagctgattatgtcccagtgtgccaatttggggtctcaattaactgtgctcagtgccatgataagtgcccatatttacagtctagaagcatgacaaaatgaccccatttctgtaggaaaaggagaatggaactgtgtgtggcgtggtacttgtcagtgctgctcccccttgtccctgccatgctggaggtggctgcaagttttccccaggaggtttttgttagagcatgtattactgtgacaataacaatgacatgcgctttggagcagggaccagactgacagtaaaaccaagtaagttgggggaatgggtcaatcttaaaagctgacctgagtgagcaatggtgctgttctgggcagtttctgtggggttaagacactgccactcccaagaggatctaagtacctggtttctttgtgcctgagaccctgagctggttggaagtctgttagttgatgaattcctggcaatcttaaggattaggtcaacgaagaagtagaaaatttcactggtttcttcattggcttggctctggatatataaaaatgctaaatataagccgggtgcggtagctcactcctgtaatcccagcactttgggaggccgaggcgggaagatcatgaggtcaagagatgcagaccatcctggccaacatggtgaaaccccatctctactaaaaatacaaaaaattagctgggcatggtggcatgcgccggtagtcccagctactcaggaggctgaggcaggagaatcgcttgaacccggaaggcggaggttgccgtgggccgagatcgtgccactgcactccagcctggcgacagagcgagactacatctcaaaaaaagaaagaaaaagaaatatggctgagaaagtggcatggtgctcctggtccctaaagtagcccctgggacctcaatgttgacctcctgtgctgggtgggatgtttctgcccaaccttgctattgtgcctctggcacaagcattctgtcagaacccagtgtcctaggaacaaaacaggggatttacgatcaagttcagatctatctgcacagccagctgttaattttagagaactgtcctgaccttgcaaaggaactggaaacagaggctgcaaggtggggagacttccactagaggggaaggtgatctcacttgctcagccttcccctccatccttcccacctgttgattattgtaaagccccataggactgtgtgaattatggaggaagccaaggaaatctcatctttggaaaaggcactaaactctctgttaaaccaagtaagtgttggggattcaaagtcctgatttatcatcagtactttgtcactctgggcaacagaatgaaagggctctcaaatagagaacagagagtcctgaatactcagataacttttccagagtgatatgtgttatgtgtaatgggatgaagtgggctagaatgaccttccaatgactgttttggagacacactaaggaaacttgcttaacatcctatacccttaacttgttagaacattggtgaagtgaaaacaaaagcagtaagtgcaactaaagtgcaatgcagagtgagtgagaagagacttaccaactcctttctctgtgatatcttccccccaccttcacccttgaaccccacagaattgtttctgtccatgcccctggctgttcccagtccagaccagcacgtcgttctgctggacataggaaaactccagacttcataacatgtcacagggccccctccctcagatggcagatctcaatattgatcacccacatcactgtggggagtggtgaccttgtcagcaatggtctcatggaagagggaagctttatttacaccatcaagggcccatggatgacccacagtctgtgtgactgctgtgtgattggttttcagacattagctttaataggaatcataggagaagggacatggtggctactgcaaggggttttttgtttagggagaacgcactgtggaactcaaattccgggtatgcactcaacttcggcaaaggcacctcgctgttggtcacaccccgtgagtttttgtggtttactaattgtcctctctggaaagaaatccaatgggacctgttgaaacacagctgaatttaattgctatgcttagcatgcagttgttaactatgtctgatgtgtgagcaagatatgaatacatgtttccctggaggctggatttggttatcaggtctcggggcagtttgataaattgtactaatgctgcaatcactgtttttcaaaggtccacaaagcacgttatggctttgggaaaggcagagataagaagcaaagctttgtgatagagacagaaacaaggccatgaaaagggaagctaccaaagcaatggcatagccaaggaagtgtgtcctcaacagataagtggcaaggaccctgttgagttgatgcttgtgttgtctggtagaattaaaaaataagatgagtgggctgggcgcagtggctcatgcctgtaattctatcactttgggaggctgaggcaggtggatagcttgaggtcaagagttcaagaccagcctgatcaacataatgaaaccccatctctactaaaaatacaaaaattagccgggcgtggtggcgggcacctgtaattccagctacttgggaagctaaggcaagagaatcgcttgaacccgggagcagagattgcagtgagcctagatcgtggcactgcattccagcctgggtgatagagcgagactccgtctcaaaaacaaaaagaaagaaaaacagaaaaataaggcgagtggactgaggactccagtgaagggagggcagcaggagttccaagcttggcatggctttcttccctatcgagatagcagaacaatgtaactttctctagagagagaacagagcccttgatttatcacatcaatgcttctgtttaggtagcccccttcctcaccgtagggacaaagcaggcccccacatggacttcacccccttaactaggctggccaagccaaccctatgggagaggcagagaatcccaggactgcagagggcctccccatgtccactagattatctgtaataaaacagaatatttatccaagttgtgaagctgtgagggagagggtaatcgtgatagattataaaaagcaatattgaaaattatacaagctgtctccacacttgcagaattcagtgtgttttttgttgttattgggtttttttctgttagaattacagaaacaggggtgctttcctgcaggcaccctgtttgcaaaaatgtctgccatctcacatttcagtagtatttcatcaacaatcttctgcacacgaaccagctgtgacaataaggtaatggggctgatttgttaacaaatcgagtttatacatttcaatgagtggcctagtcaaaacactcagcttgaagcatccaacactgtccattgctttccccctccctgaaaccaccctcaaaggccaaaacactttctttttgtagcatccatgatggctttatcttttaaaggtggattttactcttgataatcaaaatcctttcagaaccaaggctattaaatagaggagagaatcgactagttactgatactgttttggatccaaaaatagatgtaactataaaataatgtcatgggtttgtttatgtggctcataaactggctctcggggggaatcctagatggaatatttcagagggttcaacagtcatttagatgcttaagtcctcatatgttcactaaatcagactctttaattaataaacatgcataaagatagcatgagattgaagaacttttgcaaactcggacccaatagaagcagtgaagactttctgtatgaattaagatataatccgaaataaattacttgtagaaaaatacgaggtcaaggcctttcaatggggaaagtgcatgtaatgccccttttattcatggagagtaaagctgcttccataaatggtaacattatgttggtttatgtagagacacataacactgtgactacctcaggaacctacaaatacatctttggaacaggcaccaggctgaaggttttagcaagtgagtattacagacaagacaggctgtattttaaaggttgttggtgttcatgtttgagggacaagggaaggtaggacaagggaaatacccatgtaaactgtgcaagctaaaatcactgctatctgaagcggcaattctgggtccctctactctggacaggaggggcgaaggagagctctgaggcttaccatgatggacttactgccgatttcataagaattgtatccatcattagcaaaatgtttatgacttgaaggcctcaagaaactcctgttaacacaacaggagttctgtgttctttattcttttaaaactatattctcactttacatttttcactcatttttctgcctttttttatgcgtctctcctctgtgcaactcaatgcttcatctgggcattcatattttgagaaatcatctcaagaggaaatcatgtccagatcctagcatgtcactcaaagctctctgaaatctgggccctttctattctccaaatttattcccactgattccctttcatgaatgctctgctccaggaaaactaggtatctccctcccttgaatatttacacatgcccacacctgtaccctgtgtccatacatcagacatcctggacccaccacctaaaacaggcttgcacaggtgacaaaatttggcctcatcatctctcagccttgagacccagcacaggcatcaccagatttagtttcataggaagagcatgaaaaatcatatcattttttaattaagcaggccaaggtaagagatccatcagacaaagaagcaaagtaggaaggagagagatggcttctgtaatgggtttgcaaaggagagctctgtccctgaaatagcactaatataatccaagtaggagatttacaggctgcatgtttcttggtttccctttggagtgctccattcctaacaccagttgttaagcccctggtcctgaatgtggccgggggtgaggaagtgggaggagaccatgctggccactcagtggtggtgcccatggagtttcgggctcagattttctgtgagatacctcaaaattgagagaagctcaaaaggatcatgcagcaaaaatgggagaagtcaccttcttagtcataagaggattatttctgattagtccttgagctgtgttatgtcctggggaagggacagtaagagtagaaaagtctctcctaggacaaggataggaagtggtgaaaagtccttttcctggtgactagcaaagcaggggatgaaaagatctggagttggagtccagggtggattccagggcagacaactgcataggactgtctcgagttctgtggattgaaaaggttgggcatcccttcagatgttcctgagctgacctcagtcagaggtgcgtggctccagcacccagaaggtgttgaccagcacaccaacccctcctcccaggtgggccgtgacagcttccctcaatccctcccactctgacaacagtctctctgattgcttttgctttggtgctctggacataaactgttactactttgtccaagtgaggtatataattttcagaacgctggagaattattatctaaaacaccagtggatacgctacaattttggcattcagtattctgggcttgtgcaggaaaactctttctttagaacatgtagaaagactatcctttagttatccagtgtggaaacagtcctgaaatccaaactgatactgcgatcctgtgccaggttattactgtgacaattacttaatattctctgtgctcacgatatcactccttccagaagatctttagggaaaacttagttcagtttctaggaggtttttgctcagccgaagatcactgtgtgaataataatgcaggcaacatgctcacctttggagggggaacaaggttaatggtcaaaccccgtgagtatctctgctgaatccataatgaatgctctaatttcaaaaggaagccgtagcactgagctctgttttctgttttctctacttaattttatcttttatattaattctaatggttacatgttatcgatacatggcatatgtatatatgaaaatggacatacatgtaactgtctggcgtgggaacaaatgtgctggagaaaaacagatttcttgtcctttttgtcttaaccatttgggtcagaaggtctgactgagtagaacatgggctgggtgagcactgcagtgggggaatccttctccagcagctttgtcagaattatgctctttgctggcctggtcagaaggcagctttgtcaggaggtggaaggatgaactagttaacctcagaagagcctttccactccgaccatgctgggaatagaccgccataataaacagtcttttccgctgcctctttagccaacgtcccagctggaggagcacgccggccagatttggggattgaaagggatttcctgatacacattggcctggtcggttttggtaaagctttctatgactgtgtaatgctggcaacaaccgtaagctgatttggggattgggaacaagcctggcagtaaatccgagtgagtcttcgtgttaactctgtcaaacctgtctgtgcagtttgaaatatctcagaaactgcctccttcttttttagccctgaggtttaagatatctagttatggctagtgttttcttcctgtccaccaaagctgaacccttgcctacccctcaatcaaaataactagatagagggatccatatgagcagggtaggaaggccattggagtgttcagctgttttcttagagagcaaatacattcgtgcattccaaaaaggcctgtgtgggagcactgaatattacagaaggtgagtgtgtagcacatttcatggccgctttagtctgcactatgccaacctcaccgtgggccattggtaaatactgttgctttctggccaaagacaggtcaagtgctgggaactctcgggactcacagtcacgctagtgacgtgctagagcacatctccccactgtggattatccagaatgactcaaacttgcgatataactcctgcatctctcagttctctttggcttagagccttattgtggatttgctagaggtaacaggaaaggaactgatttcatcctaattctagcctcttctgagaagttattctctgcaagagtcttcagggagcatcttacagaccacctacactattcagaattttgttccgcacaccacattgtgttcccagcagtgtttgctgtggcttttgctggggccaggtcctgagtcagttctggagctccaggcttggcaaagctggataagggcaaggggagttgtacagcagaaccaaagggcttcaggaaagacatctttgatatagacattaatgaatttctaaatgggcttctatatgctaacctgataagactctctggggagaaggtcatgctttcctttgcagctctaaatataagacacatgcagaaaaaaaaaaaagaatgggaaatgtctgttacagtgccaaaatgaagataatcagtataaatattagatttgtcttaatattaagtttatgaaatgtaagtctttcagaagaactatctcaggatatatttattaggtcaatgaaatattttatccatgtgactggtatacacacttcaaaggagaacccaaaatggcaggcaggggagggtggctaatgaaaggtatggcatagtagttaagaatatgaattttggaataaaactgtttgggtaaatcctaattcagaaggttacttaatctctttatgcctcttttttctcatctgtaaaatggggatggtaatagtacctagctcactgagatgttacgagatttaaagagctaatacctataatggactttgcataatggcagcccgattaaaagttttcagttaatatgtttttattgctactatgtcaggttgctggagggaaggaagaaaaatggaaatgatccccatttatagtttttgtaaagtacagcattagagtgtggctctggcaacacaggcaaactaatctttgggcaagggacaactttaccaagtaaaaccaggtaggtctggatgtttccaagtgaagtgcagttatccactctgttcattttttgtttaatcttctctgtctcaacttctaaccaaaaactcttactcttaggttatattttccttttataaaagtaagtagaatgtgtgtaaagtctggttgatatgatcctttctaactcacttggtttcagctagtggcaaaaagaagggtgtattggatctggaattcttaggttaaggctgagagaatgtgagtttggctgacttggaagaaataaaaacatcaaatgtgggtggttcacacaaaagaaggtgatttttcataataatatactaaagtagaatccacccttgtgaccaccagaattattcaagtacagtcttccaaggacaaaatgggtagcatggaaatgatatgtttttttggggggaaaaaacatggggagagagagagaaaggggactattagttgtctggattgttaggaaacatggaagacagcacttcttgttgtaaggtttggcaaaggttatcaccaagtagaagtccaaatgtgtgtaacatacccctggcaaacgttatagaagaaggaagctggggccgggcacggtggctcacgcctgtaatcccagcactttgggaggccgaggcgggtggatcacgaggtcaggagttcgagaccatcctggctaacacagtgaaaccccgtctctactaaaaaaaaatacaaaaaattagccaggcgtggcgggcgcctgtagtcccaactactacagaggctgaggcaggagaatggcgtgaacctgggaggtggagtttgtgccactgctgagatcgcgccactgcactccagcgtgcgcgacagagtgagactccatctcaaaaaaagaagaaggaagctgggagcagtgtctctcacctgtaatctcagcattttggaaggctgaggcaggaggatcacttgaggccaggagttcaagaccaccctgggcaacacagtgagacccccatctctacaaaaaataaataaataaaatttttttaaaaatagccaggcatggtagcatgcacctgtcatcctagctactgaagaggttgaggcaggaggatcacttgtgcccaggaggtcaaggttacagtgagccaagaacacaccactgcactccagcctggacaacaaagtaagatcctgtctctaaaaatatatatttaaaaatataaaataaataagttaaagaaggaggaaggagatgaagaaaatttggcttagtaggaaagtgtttttgtactgggcagaaacactgtgtcaaactggggcaaacaacctcttctttgggactggaacgagactcaccgttattcccctgtaagtccttacctcttgacaaaaaagctcttagtctgtaatgacaagttctcacatcccagacacctaatgaatttctaaatgagcttccatgtgttaaactgataaaactctctagggagaaggtcacccttacctttgcggctctaaatgtaagacatgttgtaagaaaaattgggaactgttaattgcagtgccaaaatgaagacagtgattacaaatattgggctagttttaatgttagatttataaaatataagcctttccaaagaaccatctcagggtgcatttattagtttgtgtctatacagcccaattgtccagttactttgattaatgttggtagctgatgcagatatttagggacttccttgagaaaacttctttgtgctcaaaattgcatgaattgaatggcacattacctaaataattgccaaatctgtttcactttgtgctgtatagactcagcctaataaaaacaaatgctgttgtgctttttcccagtctgtctcctctccacacagaaagtttccctttctactaaacagcatctcttcacacgaagaaaagatgcccagcaagccatttgacttattgctgctgctagtttgcatttatatgactcctttccttagaagggatgaagacactttatacgacttattagctaaacagattgacagcctaattaggaagagagaaacagatctgagtatctttttgtggctgctgttcctaccccctcgtgtagaacatttggtcagatggctctttgagacagaaataagacagggacgtggtctctgcttgtagtgtgggacgtctcagctgcacctaagaggttgtcacaggagtactaaataggtcagggcaactgacacagccaggaaaaatttctttcccctagaacttgtgtgtgctcaccaagcaaagcgtgactaatttgacatccattgttagtgtgtgtctacccttcttgcctttgttttcagacccttcctctctagatcctattccttccatctccaactcctgtatgtaaatccctgctctctcctttgaattcctgactgctatgcccatgcccagcaccggcacccccacgcacactgctgcctgcctctgtaaccatcagctgtatttctgaggactttcctagctccttgagtgatcctcaaatggctcagggcctgagggaatctttgctgagggttggccccagcagagccgctgcagaggtagaggtggccagcaagggacacagactgcctgcatgaaggctggagctgggcccaggatgaggaaaagcctcaggaaggaagggctgacacgaaataaggaataccatggcattcatgagatgtgcgtctgaatcctctctcttgcctgagaagctttagcttccaccttgagacacaaaacatgtggttatgaagagatgacaaggtttttgtaaaagaatgagccattgtggataggctttgggaatgtgctgcattgcgggtccggcactcaagtgattgttttaccacgtaagtatatcttttctcatttctgtgggctgttatgtccgtaaatcatatagaacagttcttcttatgcacacacacacacacacacccattttccagtcactgaggagaaacagtctctgggtctacctacacagccagtttgaccattaagatggtcaaattcatttttcaagataattttaactggttccatttaatgctgccaacagccaagggcattagcatgtcgtgggaacctaatctatgttcactcactgctgtgggaggacagtcatttcttcttctcccctggcagtcagacttcagaatccagctgaccttttccatgcctgtctcttctggcagattaagtggttatttccactaactttcttgtggaaaaacacacaagacagatatattctccttcagtttttactaagaaagttttgtggttatcattttgacaataaacttcagctagcatagtccctactattcatgttaataatatcttgacttgaaccatcatattttccccacatcattcacaatgcatttcaatgctgtaacccactgcaccatccccagcccttttatcttcacaacgttctctaataaggtaaacaggatcatacatcatcaaacatatgtcacagacagaaaagctgacacacagacaagttaaataatttaagtcaaaccaaaaaaaaatcataactgggattagagcttgagattccctattttcttacagtgaagtgtcttgagctgtcacttaatgcattgaaaacataataagcacaggccataggcattttcagaacatgaaacttgactgaaacaaaaactgactgtttgattgctttggtgttttaaatgtatccccaaatctcctttgctattgatagtcatttggtgccagtgacagggaagagcagaggggcttaggaggtttttgtagatctcagtatcactgtgtcttataacaccgacaagctcatctttgggactgggaccagattacaagtctttccaagtaagtactagaaaccaaggagccattttgaaaaggtgttttctttttctttttcttttttttttaaatgaagttttgctccttgttgcgcaggctggagtgcagtggcatgatctcggctcactacaacctccacctcccgggttcaagcgattctcctgtctcagcctcccgagtagctgggattacaggcacctgccaccacgcctggctaatttttgtatttttagtagaaacagtgtttcaccatgttggccaggctggtcttgaactcctgacctcaagtgatctgcctgcctcggcctgccaaagattacaggccactgcgcccagccttaaaaggtgttttctataaacaggaacgttctcacagcactgcaggccacccttaccaactccgagctctgtaggggcctttagcacctatagctgcagaaccttctataaaccaattaatctatatgtgaacaatttaacctatatgtgaacaccatggtgctgactaaaatcttatcagcagtgaaaagaaggcactagagcgtcagatgcattatgactctaaacaaatgatctgtttccctcttttgcatttttatttaaaatatcagggaaggtgaagcaagttcaacttctccaatttgaaaactgtttctgaattatgcttcccttgtatgcagagagacctagattgactttggatgtttagtcattcgatttaatcaaatgtaattaaatgagcaaataatctccaatagccaatattcctatgttgtttcattgttttatgtgctttgctctagactttttgtctgggctttgtctctaataggatccccggaaggacagtgaaggtttttgttaaggtttttgtgtctgtgtggatagcaactatcagttaatctggggcgctgggaccaagctaattataaagccaggtaagtctcagagatgtgactgcacgggagaggagacactagttgaataatgcacaaagtgtagcatgcagattatatttttaagaacaagtcagcctgctggagacaatgcactcaacccaaatggggtctccactcccagtgagaagcatgtcagccgctaactcttttgtttggtctagtagcttccggaatgaataatgcttaagtagccctctaagagagcagaccaggttgttagggaatatctaattccctctgatatggttaaaactctttgccaagggcagaaaccagcctcattccattggaagagcaaattcagagaaaaaggaaagggtcacacagccaaagacggtaaaatgttcaaaggtgaaaaatagccaagtctgcagctctcctgacatccttgctcaggctgctgtcccacgtggagagcagatgcctgcaaagctctcggtcacttgctggagtcactcagggttctgggccttgggatgtaacttaaatgacagtgtcagggcactgtcagaggaatatgaaggctgcagcgatgcctgcaagtcagcttttgctacactgggactgaggtgttctaagcctggaaagacacaaagctgtcctcatcccaacctgccgtgcccctccttgagggttagtgtaaggctctgaaggactgtgtgaattatggcggtgctacaaacaagctcatctttggaactggcactctgcttgctgtccagccaagtacgtaagtagtggcatgtgtcaggtggattctgtgtccatggcaagtaggaagcgacagcacccttaggtggaaaggatggctgaaggttgactttgttcactgctgtcatctcttatctgccgtgatatagcaggctgtcaaaattcccattctcctggatggcacaccacagtcaggggaggagaaacatgctaattttatgataaaccccaggggagaaaaagactactgtgggaaaatttagttgagaaaatcaaattgttctcaactaaatgctgcaggctttatgcttctgtgaacccagtttcccagttattcattgaccctgaacatacgtttacctgtgcaaatacaatctctcctaacctatttatacaattatgtgtctgccggtccaaatgccttcttctataggccatgtttttatttctcttccaaaagagactccagagccatccttgggaagagtgctgagaagtcaggcaggcctaactcccaggggtcagggaggggaaagagaaggctaagggtaacttagctcagtactagaactgtgatccacgtatctgtcactctatttcctacgtttgcttcccttttgttttctctagaataagttctttttgtttgctctggacacccactgctcccaggatgaaaggagagaaatgagatcagttttgaacacttcctcttgaaatataaagaatcaacaagttacagtcatgttggggacttcttctctctccaagcttaaatttctattacgtaagccttacttttaaccaagaaagttagtgacatggtatcactgtctgggatgctcacccctctctcttttctccagatactccgtgtatactaaagctcagccaatgctcagctttgtgataaaggagctgttgtgtgtctttatctctgcctttaggatacagtcttttttataacagaaaatgttcacttctcccatttatttcatggctggactctctaccccttcctggctgaaacagcatatgggtccatggtggaacttctttgggaaaaaaaaaaaaatagaactgtttgacttttgccactcttccctcatgaaatgttttttaggctatcaaataagcattattacacattgagaaggctttgaaaaaacttgatcactgagtctggaggtgagctgggatggctctgtagctggaaaatatccctgtgggtgtaggaatgtaccgtcccttcaaacttgtgtgtttagggctgagctcacacatacgacagcaagagttgttaacaaattagattcagctttggcagttttatgcctagaaatgcaaaagaattttaaaagctcataagtttggcatttttaaaggagacattgtttgctttatgttgcagagccaatttttcttcctatcataaaaggccagaaacacagagaaagcaaaaaaaaaaaaggaaaaaaaaaaaaacacaaggagagtctaactgccccctcaccacagtgctatgtgtttggtagggttttactatgggtttcagtaaaggcaggaagtgctgtgggaataacaatgccagactcatgtttggagatggaactcagctggtggtgaagcccagtaagtggccatgttttattgatatttgaccaaacaaataaatcccgtgaagttagtggagatttaatttaatatgtaaacaaatctacttcttgaaaaatgacttttgtgaatacatgaaacactcgtgattattgagactagagcaataatgataaataaaggcaaaatgagaccaccccaaatcacctttaacattgtgcttagccctctttcttctagagagatatggggccatgagctatttacagccgcagtatctcttaaactatgttctgcaatgacttgtgtgtttactctgattttagccacagaatttgttttccattctattaaaaatgagaatctatctcattttaaatgctactaatatttataaggtaccttctttgtctcttgtgcctgcatatatattcatttcaaaaagatctcataagaaacccaaacattgtcgcattttgacaaatgtccacatctagtcccgtaatgtcaaatttcactaaaaacacagcctgactatgcaaatgcagtggaagaaaaaaacaattcagaaatggattgacactcccaggtggctttataaacacctaaaaggaaatccagagtgaaataaaatggcaggtatgataacacgatttttttttaatgatcaattcctccatggggaataaaagtttttaaacttacctccttgaaaaggagggaaataggagttcaggagcctggcattcccaggtgtgctcctggggtgtctgtttctccacattgccattttggagacaataggacccatccaaatgtccaaccaaaaaactaatattaagaggctggagtcaccacattgactgtctgttattaaaccctataacaggttataattaagattatggaatgactaacccaaggagctttaaaataggatagcctagttttaaacggttcagccttgggaaatgctggaagacaaggaaatgagatagatgactccataggtttgttttacgtctggtgaacatatccatcccatgttaattttttttaacgactatgataaagagcttctttggggtcaggtagaacccaaaggaggaagagaaaatgggacttggttctttaagtgtcaaacaaggatccagccagggttgagggcaatggcataaggcttccctctcttggtggtgagagaccacatccatggactgtggaaggagaacattttctaaaagacggggatcccttgggctaaaatgaatgatgctcatgacccccagctagggcagggctataatgagtacagcaaacataaggcaaggtatcctcagaatttggtgacagggcaaattctagaacttaaggcttagagccagggtgaagggaagactctgtaatgcagttccttctcaggtggaaatccagatatgtgccctaagtgacctattcctgccccatttttgtttgggctctgaaaagtggattcctagctcagtggctgtctgccaggtatcttttgccttcagtaacagaattatgtttgatattggaaaggagtttgttgtattgttggctttataattcactctcagtgtcaaatgaggtcattcaacttcctctcgcacatttgcaataagcagcatgaaattcaagcagaacaactagaagacacagagaaagatggctgagctgataatgaggcctgtttattacaggagaagagacaatataggaatctgttaagtcccatgaggttgaaatatccaccaaaaaatatgcagctgtcccccaaaaaaaagtcactaggagtttttgttatggtcccaatcacagtgtgaacagagatgacaagatcatctttggaaaagggacacgacttcatattctccccagtaagtgctgtttatgtgattttctgacattaactcccactgagttcaaactgctgagagtgttcagtaggaaagtttctaagacatgtgggtggcctgtaggtcctgggctcttctcttgcagaggtccagtcctcagcctttccacagctgagccaaataccaaattctcccctccaggctggaaaagttgctaccagtcctctgctacccaaatataaattatttttttattgtttattaagaagagtaaaagaatcgtgacactttgtccagaacctattttccagtcttttcccccaggcttgtccctggtaacctctgtttggactcattgttaagcccagcgtgatttttggctccaactaaattgattttggaaatgactccagcatacctatgacccctctccttccaccctccataaaagatttatttttctttatttggcctctgctgagattcctggctttgatgccccaggatctctcatttcccttgttccagggataagtgagagatgactttttaaagagctactttcatcttagagacaacaaagagagtatgccagcaagagcaacatcttgcattgagccttctcactctatgccattttccaaatctttttctttatttaggataagtgaccactcctttttatttctagtacagcaaagagtacatcatgatgtcagaaacagggatttcctttggaatgtttttcacaggctaacaataagctagaagtctgcaagcaattcagaaatgcatccctgagctacaactccatgtatggaagctcatcagcagggtagacaggcaaagcagaaacattttaattatacccatactttgtagagattgggtgagaagtgggcaaatgcgtgctaaggaaaaacaaaaactatggttaagtggggagatttctagatggttctaacagggaagaagaccaacaagaggaaacttccaggaaaaccaccaaggccaggcattcagggtttttgttatggaggaaatcactgtgggaattcaggaaacacacctcttgtctttggaaagggcacaagactttctgtgattgcaagtaagtgtttctagccatccttgattttgatcagcaatggcttcttcccttgaattatttttcagtgtacctagaatgcttttgcccccaagaaaggtttggaaggagctgggtcattagcattgcgcaggaaaattacaggttattctgttataattcgaaagccaactggacagtcatgaatgcacacagatctgggccctgcattgcaccctggcctagttgcctccagcttgttctgatcgtaatcctggcccagtttcctcctctgatcccaggagacaaaagccctgggcagagaaccagactacttagcctgggggaagcacaaaaaggcttgtctgagatccataagccttttttttttttctttttcttttttttttttttttttttttgagacagagtctcgctctgtcgcccaggctggagtgcagtggtgcgatctcggctcactgcaagctccgcctcccgggttcacaccattctcctgcctcagcctccctagtagctgggactacaggtgctcaccaccacgtccggctaattttttgtatttttttttagtagagacagggtttcaccgtgttggccaggatgatctcgatctcccgacctcgtgatccacccgcctcagcctcccaaagtgctgggattacaggcgtgagccaccgtgcccagccccaaaagccatttttaaatacattgcaggtttctatttaatgttgttattcattttgatttgcccaagtaatacattaaaatttctcattgtaaaccattcaaattacagataaagtccaggcacggtggctcacacctgtaatcccagcactttagaaggctgaggtgggcaaatcacctgaggtcaggagtttgagaccagtctggccaacatgatgaaatcccatctctactaaaaatacgaaaagtagtcaatcgtggtggcaggcacctataatcccagctactcaggaggctgaggcaggataatcacttgaacccgggaggttgaggttgccatgagccgagatcgtgccactgcactccagcctgggtgacagagtgagactccatctcaaaaaaaaaaaaaaaattacagataaaaccagcattcaccttggccacttccttcagtatcagtttcctcctccccaaaagtgaccactgaaaccagcttggtgtgttgtgatgagtttctctgtggaatatgtttatgtgaaatcccatcttcaaccaggaaagcttgagagggaaagggctcagactgcagtttgcaggatttcaattagatataaggaacagttgattagatgtaagagctgttagcaaaggaaaaccttataaaaactaggagctcttaataactagacaggtctttggtcagacaacacactgactgaggacaggaggatggattcgatgacctctgaaagtccagccaggactctgaggactctgaggaatggtctgttccatagcctgcctctgtaatgcccttctctcttgcctattgtccggttgttacagtctgagcttttgtcagagctgctcctatgctgtgagtggtctgattttctcagcatctctggggtttttgcaaagaaaggaaactctgtgcatactctggggctgggagttaccaactcactttcgggaaggggaccaaactctcggtcataccaagtaagttcttctttctggctaattattcttcccgagaagcctgtcttccatcatgcagaagctgtcaaaacacaggtggtgttttctttgcttggtttgtgttgggtggttagtaatatcagttggaaaacaaggttattaatgcacatattccctggggcattgtattcggacatttaatatccatgtagtctctccctgtgaaaatatgtgaacctccacgaaaagaaaggtccaaggaaagtagcagggaaaaggcaggaattggatgaaaatagccaaagagcctgcaggaatataaacaaggcaggatcccaggagacagagcagtagccactttgagtgaatttcccaggaggtgctcctgccaaggcccataccttcaaggaaaattaaggcaaatagaattgggctggggagttgctacttattagtattcctcccacgttctaacctaattataaggaggttgttttggccatgggcagtcatctcaggttttgttttcctgctttcctccctaacctccacctgtcttcctagaggcctgagtcaaggttattgcaatagcactaaagactgtgtaacaccaatgcaggcaaatcaacctttggggatgggactacgctcactgtgaagccaagtaagttgtgttcttctttgcctaggccttcaggggcaatcaatcaaatcattagtttgaaaaagactttaatcctatgcatctggttgggctctttattaatgttctttccccaggccaaagagagttggttctcttccctgctttaaaatgggatatgagtgcatgtatgcacacagcatgcccacatgcagactcttgctctagctcatggtaagggcttctcaggagcatatacaacattttgaaagaaatagagaaacaaacaataatgagccaatggagctgtcaggaaggttctccaccacccctgaccaggcttcccagcaggatctctggccatataggatgtgcttgcactatatcggatggtctaggatgggaaatatctctctgtaattaattccaaaatttggcaacccttattgccagaaagtacttctcatatctaagtttgatctccctgctgcgatttaaatatctacttgaaaagaaccactagaactctgtacatctgggattgagaatcaagtaactgccatagaatatgaggctgagcactaagcccacctctgcagcacctctgacgtgtcatgggtcccctctggacattttgagctcaagtaataatggattaagcaggatagcacaagctttggaaacagaaaaacctgaattcaagtccttgctccactacttacctagctgtgtgaccttgaacaagttacttaatctctctgagcctcagtttccccatccacaaaatgaagataaaaatattcctacctcgttgagtcatcgtaaagatgaaataatacagctaaagtagttagcatagtgctcagaacatagaaaaagctcattaaaccctcgctattaataataatgataaacatcatctctaacccacagcagagcctttgtttggcccctggggctcttctgtcaaggttctgttgtgcatcagcagcagagctggaattggggggagggtggagaatgtcagcctgttctatgaaattcttcacctgggatttgaaagtggaaatacaaagaatcctgactaatttaaatacaaaatcatccaagtgtcagaggcaggggagaggtttctgcagagagctgcatagctgggatcctcaaggctacacacacacgcttggagcagggatgcggttcacaggatggcagggcaaaggttgcagaactgaaaccttgtacttccccatcaccaaaatgaccccagcatgatttcctttaaggtgtcccgagccccttcccaaaagacaggctccccatgtggaggggcaatgacagagggaagatggaaactttatgggaagggctatctatcccaaggttgtccttctcctcttcagggtagtgaagctcatgagaaatatggctcctgaaaatagccactaaatgaaactctccaacctggaggtagaggatcagtaaagtctgcagaggcaaaatgaggcagtttatttcaaagaaaagaggttgagggcaaggtgggagttaagtcacacatctaaatctgggaaaggaagcattaaacagaagacggaggggctcggctctccacctccaccaggattcagaccacaggacatggctaatactgcaagaagggagttaggttagtggtaaaacctttctaataggtttttgaacagtgaaaatgagctgtcaggagtagttgccagggcactttctctagagagtttttgaaaggagatagacaccctgctatcagaggtgattggagtgcagccctgcctcgaggcaggaggagaaatgagagaacctcttaaagcctctttccagcccccagagcctgtctccatgaaaaaggcccaggctcattaatgcagagctgcatcctccaggacacagggggttgctgggttgttaagtttggaacctttgccggcttagtggttaccaaactccctttgttctcaagacttgacttgataaatgggctggctttatccctttaaagccaaaaacacaggttctgagtgctgtgttgtttgtggtgttgagatgcccaggctggagggaggaagctctagggggtttttgctgagcccagaaacactgtggggataactatggtcagaattttgtctttggtcccggaaccagattgtccgtgctgccctgtaagtacagttaagtggagatagaaaatgagtccagtgcttgatgtggggagaagctgcagggtcttgaggccaggagtccaccgtgacctcaggagtggtgatggagaagaaggttaaaaaaggaatgagaaacagaaccataaggacaatacagaggaagggttcattttcgggaaggaaaatcacaaggccgtgtgattaacgctggaggaaatgcactcctttggagggtcccttctcaggagggctttgtgtcggggaaagctgagctgttaggtttttgatgctgagataatcactatgcagaaggacaaggcttctcctttatctttgggaaggggacaaggctgcttgtcaagccaagtaagtgacatataatttatatgtgctgaatatgattatctccaagaggaaaacttgccctcttttccacgggtgcctccttgggtcaggaggacattaaaggtgttgagcagaccaaggcccagtacctcgtcaccttcttcatccttgaaggagctttaagaggtgtggacgggaagaaacccaccaggaccccaccaataagcccagccttgagacccctccactctgtcagacttgaataagaaccatctgagaacaaggtcttcctcagaaggggactccagcatagtcatccccatttgatagattttgaaactcagggcggggcagagtggctcatgcctgtaatcccagcactttgggaagctgaggcaggtggatcacttgaaggtcaggagttcgagacctgcctggccaacatggtgaaagcccgtctctactaaaaataaaaaaaattagctgggtgtggtggcacgcacctgtaatcccagctactcagaaggctgaggcaggagaatcgcttgaacccgggaggcggaggttgcagtgagccaagatcatgccattgcactccagcctgggcaacaaaagcgaaacttcatctcaaacaaacaaacaagctcaggcaagtagaggccagtgattaacactcttccaataggaacagatcccaagcaacctgcagtagtttttccagtaggctcgtgaactcaaaacatcaagttatttaaatgacagggcaaccgttgtgatcagctgtcatttgagtagtgctgaggactgggtctgaccttgagtaaacgcctaggctggtgggtttctatccctgcagcatctaaagcggacgcccaggcttcactgaccccagcagtctggctttctgcccttgccgcccgggaggtgcagctcttggcacacaccatccttagtgtcttgaaagaagagaaattaaaagagaaagggggaaaagcttatatctcatatcatgcagttgcctcattttgtagcaagattgtttccccatgagcagtttgtcttcattcagcagctgtcttctctggggaagccattttgtagaggtgtttgtcacagtgtgacaactgacagctgggggaaattgcagtttggagcagggacccaggttgtggtcaccccaggtaagccccattccctggagcctcacctgcccttagtatttggcatgccctgcatgccaaatatttctagccgagactatgagaaacacatctgaaaggaagccatttccctgaacagcagtacccaaagccattaagcaaaaatgagagatcagactggtgttaaatagaaacgtttttggataaatagtaattctcattattctctatcagtctcctgtgtgaatacccttatttcccttataaggaaaaaagttacaataagcaggatagccatgattcatgctgtggtgtgggagcaatctgctgtggatttgggggtggaggattagaaatgtgttcaggcagactggatgtgtttttgacaggatatgtaacacagtgtgatttataaccagggaggaaagcttatcttcggacagggaacggagttatctgtgaaacccagtaagtataaaattgtatccctggattaagcaatgtctgtggattaagggctgatttagacccaattatacaccatatgaagaatgtttagagagggggatgagcatcaaataggaagccaatcgtcgtcctggctaggatctagcatctcagtgcaaaatgggctatgtaagtgtgcctctgggaattgctcctgatatatgtgttgggactaaaatgtatgactggctacttgttgtattggctgggatcatatccctggatttgtgcagtaattggtgacaagatttctaattccttaacaaaccttctaaggcactattctatttggctaagattatgtcaatttatagaaggaaagaaccttgtaaataatgatcattaaccaaaagtaatgtgattagtctctctcaaagtctgaaaaaccacttttttttaaaaagtttactcatgactactgagggacacttcctgtttctgagactttcagccaaaaattcgtacagcgtagcctcacggagcagagagaaccttgacaacattcctttttgactttctccatggatgagaaaactgaggctcagggaagagacagatcccggccccacagccagtctatggctgagctagaactagattttaggtctctaatttgccaaacctgtcagttggctcaaacttgaagtttgaagagtccgcaagattcatctgacaaatattttcatgtacttgccctctgccaggctcgttgctgaaaccagggatccaacaggaagcaaactcagtgtgatattgccttcatgaaacttacattctggaggtggattccatgtttcttcccagatatgacaatgcttaccctgatttctcttgggcatggctctcttatactatcatcacttccttaggaaatactaaaactaatttttgctgcagtttaaagtccttgagcagataactaacacacataccactttagtcaggagaagggaaatgcccaaaagtgaagtagaaaactaggaatttgtctgataattgattattataaagttattttatcagtgtgaaatgagtggccaaattaactggacaatgccagctctgtacctacctcactttgattctatagactcagtctcaggaggattcaagaattcagacagttctctgatgacataatccagtgatgcccacaacagaggaggcgtattctctattctggactttgtgagtctccttggatgaaaagattcaagtgctgttttgacacctaaaatcagagagtatttgctctatacatatatcaaaaatacacagttaatgtttagaactttgtagtggaaagtggaaagcaaaggtcccctaaaagaaaatgggattgtaaagacgaaggagggttagtttaggatttgtagaaagtcagtttggctactccagaccaaacctagattaacagtgatgcaggcctaattcaaaaggaagcactgccagctctttattcagtgctttgccaacctggcctgtttgatctggtttttgttgttgagcaaatcatagtgtttcttctggttctgcaaggcaactgacctttggatctgggacacaattgactgttttacctggtaggctgcctcaattaaatactatttgcactgatttactaatctacaaatgtattctgtacatgtaacttaatgggcctgaggttgaagatggggagagacagcaacaatgcatactagaaagggtaatgtgagcagagaattatttatcagagaccaagaagagaaagagaagctttttgctaaggcttttagtaataggagttaatgaaaatgaatagaaaaaaatttcattttaacttagaagaattgctgaataatgggaacagattccataaggggaacctctgcttctgaaaatatttgcactaggaccagcctacgtgctacaaaaactgtctcacaccaagtctagttggtcacttacatttttagcctattctagtagctatttctaaataagtcttcaaacatagaggtgcctatatttaagatatttaaatgaggctctatttctatagctctctggtgcccttccagcaaagcattgctgtaacacattgcttatcatttctacaagtgagaacaagtaagcccctggccctccaaaattgcatgagtattataattacttggcttagattgaagtcacttctgtgttacttctcataactgtgttcatttgttgagatctgtttaactccaaactgtgtgggcgtctaactgttggcactaaggtttcttttctcttgaaattgccagcaaaatattttacccataaataatgtttcatctagacttgcaaatgacaactaacactgcaggctctttttttttcttttgctttgtttccttttttctgaagggaatatgcaagcaggaagcaaaaaaaaaaaaagccaaaatgtacagtttgactgtggggtctgggaggagagtgtcaatgtggatgctaaaatatacatggttgtataatgtaggtactgtcacagagaggctatagtgatcttattagatcatacatacagagcaccactggtcagctggcgttgctcggggtgtccttaagaaaagctcaggtctagttgtcaagtgcaacccagattcagatacagagtctcagagagaagcttccagatcaccctggagctaaatgcagaatatgaattttccccttagttaagtctacctgaggggaattttcatttataattaggaaaagagaaaggtaaagaacatttacttgcagtgtcctgtttcaaatattgtgtgcattgagccagaggacacaagaatgaacccaagcagaaaactaaagaaaagaaatcaataaaaccactgaagaaaaccagttgcccttatcttgcctgtctctgataatgaatgtgccttccctgctcattcctcactttggttctcaaattttccagggaattagcaaagaactggtagggttgggttagtcttggtctaatttggttagtcatctctggataacaagtctcctttttaggaagtgccaggggattttttgtaatgccaataaacatggtgtacaacttcaacaaattttactttggatctgggaccaaactcaatgtaaaaccaagtaagttatagttgcctagaagaaaaagttaccaacacattatgctaaattcttcttttcagtctgtatttcagttcttttattttgcattttgggtccccacccatgatattttattagtccttattcatatgtcacttgaacagatatgtagtaaacaaatctcatgatcgagtagacatgctgaaactgccaatgttctcaaggtgctattctttataaggaaaatgcccaaattttaactgttgctactgaacaaaagagcatttggatataatttaaagcacccctgaatgtccaggatttcagagaggagacatgacaaattaaaattatatgtattatttaaagatgaaaagaattagatcctcttgaaaatactctaataactaacatttcttcaacattcgcaatatgcaaagcacctttcataccttgactcatctgaccctcctaacaaccctctgggatagatattacctatctccgcttcacagatgaggaaacagtgtgaaaggtaaaactaaagcaaagaggttgaaatagttacccaagggctcaccgcagatgaggggcagagctagattaagagcctggcctgcctgtcccctagcccactctcttaaccatggtcttggtgaggtttgtgtaggcgacctcgcactgtggttctaacgactacaagctcagctttggagccggaaccacagtaactgtaagagcaagtaagtaagaaagaaaagtccagaataattttaagcaaaatggtgggtaggtttttcagcaatttcacctaggaagtgcaatgtcaagaactaaattctaagagctttcccagtttgtgttagaaccataatttttctacctcacacgtctccctcgccttctctgtcacctcagaacagctcctcctaaggcatgacttcacaatggtacatttgttggtggcgcagtctttgtggtcagataaaaactgagctaattatctgaaattatctcaggtctctaagtgagagagttaactcctttcaaatatttgaagaactacgatgtagaccaggtaaggggtgagtgtggaggccaaatcaaaacgagcaggtgcaagatgtgccccaacctcccctcaaacattgttgaacaagtggaactgccctgagtggaaaggctgctttgtgaagtatggaacttttcttccttagatatcttcatgccagacccctaaggttaaccatgagatgttgcagaaggcacttctatgccattttagctattagattgaatcacctctgggctccctttcaaatctaaatgctaagatcccatgactcaagcctggaggattaataggtgagctcagacttgtttcttctatttttactattttgatagccaaagaaataattcatcaaattattcataagctaaagcctacttgggatttttacacctagaagatggtggggtatgatttcccagtgcagtaaatgagaaaacaataggagacatcaaggaggaaaaaaagaaggaagagataaagggaatgtcttaagggaggctcagaggttgaatgaaggaaatgaggtgattttgcagaggacagatgtggctatcaaagattttacaatttcacctttggaaagggatccaaacataatgtcactccaagtaagtgagcagccttttgtactcgaaaatagggccaggggagcaaagtttcttccaatttaaacacactcaaaaggatgtgtaattgctttctgatgggagggaactctgaaggtagaaagactattgttaccacagatcacttgtccctggagatatagcatctgaggactgactgtctagcttagactgctgtctgcacaagaagaagacttacagatgcttaaggaggatggaggcaaattttcaaccctgtactccaaagctgaggggagaggggatgggaaacattagggctgggttcatgtaaaggggaccagcattgtgccgacagaggctcaaccctggggaggctatactttggaagaggaactcagttgactgtctggcctggtgagtgagtcgctttctattccaggaaaatattactgtggagaaattaaaaggggagatgaattaactcctttagtcttgaaactaaagagatatgtgtacttcccctcctggaggaccccagtcctaggtagattaggacgaggaagcagagggagacaaaggcgatggaaagtcccttttaggaacccaggaatcagagagaacttgatggtccccaccaaaggcaaagaagggaggtcccactaaaacatgtgagcatcctaaaacacctgctctggtccacccacaatatttggtgaaggacatggccctccacccagaatgggcaagcaaactagaccagctttctaaggtgtgtttttcttgggtcctgtgactcttggccgtctccctgtcagaggctccatctgtcgctgcactctttcttattgagaatggcctctccgtggttctctgtaaactttccccaagaagcctgtttccatgcttcctcagcacttagcctcaccgatggatgggctctagagtagctggagggagtctgggtctgaaactttcactgagaaagtaaagttgatccgcagtatccagtggatatggcagctgggaggacctaggactgaagtactcgtcctctctttggggcctttcctgggcactcgattgaatacagaaaccctgttagcaagtgcatgcatgtatatgagtgtgttcattcagcatttccattctgaatgtatgaatagccttactctgaagactccctggagcttacagggctttctgttttcagagaaaattgcctttgtgagacaaaaatgccaagtgggcccctgaatgaggttatggttgagagctattaatattatccttattcacagagcaagatccgaattcccaaagcagagtagacaataactatgtgaagggcttagacccaaatatgtgcccacttgcaagcattccagctctatgaagaggatacagtgctaggagataggattaccctgcacattgcaaaccctccacttttccaagaccatagaaaatgtcctttgttgagcaccaactgagtgttattttcttggtccctgtggtttttgctgggccttaaatcattgtgtgatcaaagctgcaggcaacaagctaacttttggaggaggaaccagggtgctagttaaaccaagtgagtactggggcttgacccacaattgagccttgtcatcaatttgcaattcaatgtgccgtattggcccaaattaatgtctcaaacttgtctttaaaatgtttcatgttgctcttatgcataaacatgcacttatgtacaaattcagcatggataaaggatattgtcatcttgacattttctagaatctattttcttaagagaaggcacatagtaaaaggtacttttcttatttcttcacatttcttaactgattttcccaagaggcagaggaacttggacgtggcgtttctgtctattcagagtagttgatttgaatatggtcacaatagcagagcaaggacttacaatttctaaggttcaaaatattgctctctgtaccagcctgcagcctctgatgaaccattattctgatttatttcctctggccctcatttttcccaattaatgtaactgaaatattggtaaccattatcttccggttcacagaaagtgtgtgaggattaaaaagtcgctgctctgaaaaggaattgagctggagggttttcttttgggggattattgttttgttgatggtattgtctctttcattgagggagagaataagaaaggaggcatacttgaaaggcaaggtaatatgatcaatacatgaacgtgtgcaaaataaatcattaaggcattcaactagaagccaaaaaacagtatggaccccggctcagccactcactcactaggcagccatgagaagatcaccaagctctcccagcctcagttaacctaaaatgtggagattattattccagccttgactacttccaaaggatgctatgaaattcagatgagataatatatgtgaaatctccttgaaagagatgggtggtcaaatgattcatgatttttttttttttttttttttttgagacggagtctcgctctgtgcccaggctggagtgcagtggcgggatctcggctcactgcacagccgcctcccgggttcacgccattctcctgcctcagcctcccaagtagctgggaccacaggcgccgcactacgcccggctaattttttgtatttttagtagagacgaggtttcaccgttttagccgggatggtctcgatctcctgacctcgtgatccgcccgcctcggcctcccaaagtgctgggattacaggcgtgcaccgcgcccggcctcatgatttttaatagttagattttatgcaaaatttcatttgagggtaaacttaaaggtgaacaagtttaatggactttggccatggcagagaaatggttaggtttggatataaggtggacctctctaattataagaaaaaaaaggaacatgagaattggtgaacaagaccttccctggagatcttcagaaacctgaggtcactcaggagagaaatgtgtgaagttgagagcttacagtaaatggtctctgaagtttcccaccattccaaagagtgcgtgagcttaaaatttttcgtgagtttagctaaatatgtgcttagtgttagattaggtttcaaccaagcaaaagaaccctgggagaagtactctgcttggaaatgaagcatcctttggtttttgtggtacaatagatcactgtgggttttcagatggccagaagctgctctttgcaaggggaaccatgttaaaggtggatcttagtaagtattattactaatgaattcttaattgattagtttttgagacaagtaataagcttttttggaaatctaagtggactgccaaatgttctcgatttatccatatttcatggggagcagaattcttcatgccttctccatcctcacttctgccaggtagcagtttgcattgttaacagggaagcagaatggaagcttaacagagaagcagtatggaagacgtctccttagcccagtggtcagttgcatcagagaagtctgctctgaaatgcgaacactttctcttgcagctggcagccccctgcaacctcagtgccctccatggccagggcaaaagcttccaggtgcccagataacatcccaaagtcactctgagagaaaatcggtcttactttacccttttctaaccaggaatttacatggttagttttacatctaacacttcagcagggagaagacatgatctaaaggtccatgtggacactctgtgtgactcggatccaggatctgctctttcagcccctccatttatcgcaaaagggatgatgattaattcctccatgcctagacttcactttagacatcacctcagagaggcctgtcttacccagccaatctaacaagccatcaaacacagcactgcctggctgctctctaccctgttatttagcctgattttaattcacacactttcatcacttaacattatactatctgtgtatttattgtttgccttcttctagaccgtagacaccaggaggacggggacagtgtctaagtggctctcaccgtatccctagtgccggcacaatgtctttacacatcggaggtgttcagtgaacagttactgagtgaataaaggacttagcaccaactgccgctctttttcatgaaattacagagctttgctatttcatacccaaatactaaaacctactgagatttttgcaaatttccatcatttatagttatatccaaggtggatttgagtgagcaggtacatgaggtatttgcagggcctcatttcactgtgccaaccaggcagggaactgctctgatctttgggaagggaacccaccttatcagtgagttccagtaagtacctgataattattgatcatagtgcttgtacttatcctgtagtcatatattgcacaggtgaccaaatgcctcctatttctttgagttaaggaatattgacatttgatgaggaaagccatttaaacacatgggaaaattggatgttgtctctcacccctaatactccaaccatagcccctgtcctattccatgctcttaaaaaaattttaattgatagaagaaagaaagattatctacaaggatatgagcaatttgctaaacagtggtaaaatgagattatgtacaggtgttgattcctaggtaaaaatgggggtcagagctgctatcctttggctagtaaaacaagattacttggtgaaattatgtaaatctcctcgaaagaaataagtttcagagttgtctagagaatatcacttggactgttctcaggctttccactacatctattgtaccactatggtgccctgaaaagaggctttctcaggcttaattccatggcttagtctttattccagtatcaaaaagggggaatccagccagagctcccatgagggagatagctgcatgctaaccacattaatctattatcaaggtaactcggtcatttttgtcaggcagcacagtgctgtgatttatagcacattcatctttgggagtgggacaagattatcagtaaaacctggtaagtaggcaatatgtcactaaagtaggaggcttaatgtggctactgagacccactaaacttactgcagtatttggaaggcccaagtgtcaagaaattaatggtttatgcagacttaagtggattccaatgaaggaagaaatgttaaagtaatggcacagaggatagaagagctagctgtgaaaaaaaatagccatgtggatgaaccaaacgcaacagactgaaagatcctagagagttgatcctaaagaaaaaggcagaaagtctggctgagcacttccagttcttctgacctggcttgattagtgaatctgggccacagtatctttatctataaaatgaaaacatttaatatcacctcagattttttgttttaattttgtgggtacataataggtgtatatatttattttaaagataagctaatatatgtgaaagtattttgtaaattcttaaatgctatccacagtgaaaatattatttgtttatagaacaaaaaaaactatgtcagatttagaattcttttaacatgagaatttgtaggttcttagtgaaatagccatttacatgtgatctgtagccctaggcattggtaaaaagcactttctcttctactgaaatatagtggctcaaatgctacccaaatgaaaagggcaggggaagggaagtcattttgtaaaggcaggcattacagtgtgaattctgggggttaccagaaagttacctttggaattggaacaaagctccaagtcatcccaagtgagtccaatttcctatgctttcctcttccttgtgttgtcttctctcagaccgtaacatttggagcacataaagagatattatgggcctgctcttctctggctgtttcaggagactgaaaaggattgtataagaacatcctttagcatgttcttagtattgttttgtccagtgtgtgtttcttcttaatatcaaaaaaaactaagacattgcctgtgaagccaatggaaaacagtagatttgcaaagaaaagaactaaagagaagacaagtggtactttttaccaagcttaaagcagagtgggtgtcctttaatcagagggatgcttggttctgggggctggataggactcaggtaagtaacaaggctaccactgagtcactgagcttctaaaatgagttgactcgggggagcaggaagctgccactcatgatgatctgaatgctattccgtgaagtttcagattgattgaagttaaaattaggggtgacactatgtcaggaatctaaaaattgataactgtaatggaaatgaaagaagggctagctacatctgttggataaatggagttgaaaatcatgaatttgatggcgacagacccagagagttgggcaggtagaaacttcatttcaagtgatatgcagtaaataccccaaatttgagtcaaatggcctgtgtaaaaaggaagtgaaaatgtaacccgtatctccttgtaggtgaaaaggccatatctctaggtcttaggtatgaaaaggatgtgtgggcttctgggtgtttttgactgactaagaaacactgtgggatggatagcagctataaattgatcttcgggagtgggaccagactgctggtcaggcctggtaagtaaggtgtcagagaggcaacagaaagattgagggtaaaatgtcttcatgtctcaggaaatgattgtataatgcaaaatgagctggagttttttaggagcactgttactagagttctgatgtctggttctagcaaaagaaccctaatatagctgtaatccctctctagaaggaacaaggaagaggattcttctctgaaagctcctcctaagatttatccatcctctgccaaagtgtcttgtggatccaggatacttacatctttgttagcagtgctggcccaacctgctcagcctcagatcacctatccctcatttgtaaaatgaggataatatttaagctcatggcacagttgaagcccaaatgaggtagtggaatatatgcagattattaatccatttggctcataaatgaaggttttctttccttttccctatgtagatcatgggttgaaatacctaacactgcaaatcatttttgtatggggatttgctatagtgtgaattcaggatacagcaccctcacctttgggaaggggactatgcttctagtctctccaggtacatgttgaccccatcccacccatgttttccccttatctggtttaaggcttccatatgtattgcgtgttatcctcatggatttcatcatccttgttttattatcaatgttctgtgaatttaagattgagcctccatggactcttcatttaaaaatgaaaatagctaatagaagagttggaaataacagtagaactaattcactaggtcaggatggagaagggagtaataccctagacaattaggacaaacgatggtttttccagaaatagcctcactcctgtttaagcctagacgtggtctctccccgggcacccttcacattcctctaaccctccatatcccaaatttagctgtggaatcttagacaatctgtgacctatgcagctacagaaatcttttcttactgagatatctgcctatttgaaccaaaagatccttgagaatagacagtctctaatattccatgaagtgtctgatatggtccttttacaaaagtaaatacttgataaattcttgcttaattgaagttaaacacccaaagaaatcaggtttccaggccaaagggaagaagaaaattaagcaaatgacacagtacatttgagcgtgtagtggggaggaagaaatgctagattgggattcaaatagagccatgttttggtctctgctgccaactagcaatgtaacttagaccagatctcttgcctctaagcctcagtttctttatctgtaaatggggaagtgggtccaatggccctctttggcctcttagtacaaaaagtctatgaatgtatcccatttggggcacttttttctcctaggagtaactcaatagctattttaaagcttgagtgttttctaactcattagagcacatcaagaagaggggtgaagtgacaaaagggagtttattgtgaggcatcaaacactgtgatactcacgggaggaggaaacaaactcacctttgggacaggcactcagctaaaagtggaactcagtaagtatgagattctatggtaattacaaaatgtattctggtgacaataagtggaagaaaaggtgatgtaatttttgtcattgtatcttatttttaatctattactgaagcattaagaattgtgacatccagataaattagtgaaagtattcaaaggctatataagcatgctttctttagggtggaatttagctaaccactaagactttttccaagatatgagattttcagctctcttcaacgtgagagtttttaatactagtattaagctaaacgatgctcaatggaagaaaagagctagaagagcagaaaattgcaccgtcatgatcaaatagatcctttctacttccactgccatggactcagtggtgcatttagaagagggtattcaaggtcattttagccatgccccaaaaaaaccactcccaattcattccagagattgtgcccccttatgctaaacatcatccaagaagagtcagtgaagtacagagaaaggaacccagggcttcttgtttcggtccagagttctaggtttgatttggtcccaactggatgtgtgatattggaacgagtcattgcccctctctgcacctcagactcctccagtggatgagggggtcaaagccctcaaaatctgttgttctgggatttcgctattataccacccgagagtttataggactcgagagtatggaatcttgtgagtatttcataaacaaattctatgaccctcaggaaatagccctgttaatcaacaacctaacttaacatagaaataataaccaccatctcagtccctaccatgtttagatacgatgctagatgcatgacatgtagaattgttcatctgaaataactctgtgaggtaaggggaagtatcttattttacaaaagaagaaactgaggctcagagaaggaagtgcccaagatcccaaagctagtaagtaaagggcctaaatttaaacttgggtctgcctgcctgactaaaaagccctgctctttcttttttttaattttattttatttatttatttatttatttctgagacagagtcttgctctgtcacccaggctggagtgcagtgcagtctcagctcactgcagcctctgcctcccaggttcaagcgattcgattctcctgcctcagcctcccaagtagctggggttacaggcatgcgccaccacacctgaaagccctgctctttctactgcatgatgtcgtagagcttgtgctctagtttacttagaaatgagaggtgatgccaatcacagtgactggtgaaatgcttggaatttatcttttctactttagatattgctgtgagttagagagggtgcttcgggaaatcttgacatggatgccccaagtgtctaaagagttctcctcccctttcaatgacaaaacaaagtacagagttgctgggagcatttaccccaatagggagaaaagagaggggagctggctgcagccactcccttgttctgactgtccctttccttcgctgtttcttgtattttccccaggcagaccagccaccaatataactgatctacaagagcctgactcctttgtgagttatagagaaatgcagggtgaaggcactttgcacatagaactttagctctgagagacagcctcaaaatatctagttcacccctctttattttcccaataaggaaattaagacccagagaggttggctgaattgtctaaggtcagtgcgaactagggctgggactagaacctggagatcctggtcctggggccatattctgtgactgctgtttggtgaactaaacttctgataggtaggaagtgtgagttatgctcataaacaggaaaaacaaataggttttacaaggggagtataaaaatgtcctccttattactagcaccttagtataggctccctagacctgctccccagctgtggtgtaaaaatggaaggagaaggaaatggcccattttgtcgcagtgcaaatcactgtgggaaatactggaggcttcaaaactatctttggagcaggaacaagactatttgttaaagcaagtaagttccatgaaataacctgatttatattacagttgaagaacatctgttttcattgatttttttctttttagggggaaggggacatagttttgtctgccagttaaattagaagatacattggcaataataatgttgcactgtacagtatccatgggcatcactcttgcaagaaacatgtataattaacaaacagttaagtgtggatggtaaaacttccctaggtcctatctagaactgaaactctgtaattatattaataacttttttaacttgaatattagtgacatttttatataacccaaggtatacaaagcagaatcttcagttgggttctatctgatttgttgtcatcttccaatggtcttaggaaaattaaggttaaatagtaagattagatgcctcctaccactttggtacatgcatgcagacatagaaacacccttagtaactaacttgcatgtgacttggcaatcctagctatggcccagtgacagggtcccattttgtacagagttatgtcagagtgtgaacacaggctttcagaaacttgtatttggaactggcacccgacttctggtcagtccaagtaagtcaaatctgcagaaatgtgtagccctatcctcaatattgggcatatatggatataattattctggtctataatagattattattactactattttgttcttattaatcataacaatgctgctaatttcaaatatacattttctgccatattattatttttacctttaaggagaattattgtcaagatatcaggagggaaatatttgaatttcctttgagtcaagtttcttatttgttcgtcagttcccacctctctgctgagggtcatatgaacctcacgatgttttggtttttataccgccttcttattatctctcttagaaatgcttccttggtttttccttgcctaagcacttagattttgcagctcacatttacccagagtatacttagcttttaacctctcccaaaactggcctccctgtcccaataattatgcacagtaaaagtcagttcaattcagtaaatgattattgagtatcatcaacaaaccagggaatcatcattggttttaaaagaaagaaacaaagaaaagaatttttaaaaccctaagctatcttaggcttctgatctcaagaacttccagtcttatcagagaaactaagcactcataataaaaagtctaacaaaaatttatatgtgtatgtgccaagataggggggtgggtttcctgagggctggagacaggacaggtatgaccatgcacagccgcattctttggcagagaacacacatgattcccccaaatatgtttctggaaacggaattgagtctgttctgtgctgagatctttgactttcttgaggacaaaagcccccttggcagttagcatccttgagcgggggtgaggacagaaacaggaatgagtcaggcgtgagtcacccaagactctcactcagccccaagaggatggagtgactctgagtcatgccgaggcatgtctttagcatgtgctccagcagtgtgcatttatggcaaggtgaaaaatacatttttgcacatgtcactaggaaaatggtaccttcttctcaggcatggcagatgaagtaggaaaatgcccgcctgctctctggtatctttagaaatactcacacccatccagcctatgtaggatacaatgtttttcatgaagttttatgaagattctgtttttcccaaaggagaaatagccaaagctgtgtttattgatagctgtgatgaggaaaatgaaggccaacaggtagcagtggggtctggtgctgtttataccttttagggaggttccttcaagtcttcataccacccattacaaggaaaactttagcatccgcctttcagggtttccagatcttagagctactgtgaaggggatgtgtcttcagagaaggggtgggcaaaaccaggaggtttttgtaatacacttacacagtgtgactatgggaacaacagactcgcttttgggaaggggaaccaagtggtggtcataccaagtaagtgagctgggatcctcctgcacaaatggccacagcacccccatcgctaccctgtgctggagagcctcttatcatatttccatgggagcgggggaaggacatgccattcatcagtgctatatcgaagaaccttaggcggccactgtcccaaatctttgcctgtccctggtttctttcactctccccttctctgcatctccactgaccacactcccattctcatgtaagctgcccctgatcttccctgaggctggatttcagattgaacaaaggaccacagaagtgagagctggaggggaccgtggggacatcttgctcatgttgcagagggacctgatgccagggtctagcatctgtccaagaccgtgctgatggtcagtgcacagcagtggaggggccccagccctttactcccaccctgagtttggtggagccacacactctttgctaagtgaccctcaaacccagtgtgagataagctgagtgttgacagtgcccacctgctaggcaaccaagtactgagttcctgccccagctcaggactgtggcgcaggccatgacctccctgagcctcagttttcatatctctgaagtagacagcatggtctctgtttcctcccatctttcaaaaattctatggaaattattgtgacttttttctctgtaattgtagggtttcacagaggcagggccttgtctgagtcaaggtcattagaaataaaggaatccaagggctttggatgccttggcctaattctaggtggtaaagagggaaggatgaaagcacaaatcacaggaagtgcctaaatcctgcttggatttagtgttgcctcaaacagggatatgcagaaatccaaccccagggtctcccataggaagaagactaggagtgggaagtgccaaagagctctggaaaggaaaagagaacaaggagcactctgagaaaaggaggtcagaacagcttcaggaaaaacgtcacataaaatttcctttgctctctgtcctcgcagcactttcagaagctccttgcatctgactaaagagtagcagagccagaccctcagaatgtctgccccaagcaagcagagtgtggtgtttgtattggggtgctgggagcagacatggggagttgctgccctgcttctctgctgatgggaaggtggtattttcccctgggtacacgggggccaaagagctctccagtccccagcccctggctcccgcccctgggctccagcactcgggggctctaaggacagcagtaggagactttctacaactcagagagtattcaggagggtttcccaggatgttgcccaataccatggggcaattggtagagggaggtcacatgaaacaggttttatcaaaggctgtcctcactgtgtgcatcaggaggaagctacatacctacatttggaagaggaaccagccttattgttcatccgtgtaagtattatagaaatgatcaagggaaattttgcagacagattatattatggaaggatactgtagtagtgagagtttgtgttgtgatctattccatcattaaaggagtcctttgttgcctgggagtaactatcagtgtcaggtctgatgagatgattgaggctgtgccggacaagggttttgcacaatgatttcagaggacaaatccccaagttgtgaaaaaagacttcactcttggttaggtttctaaaacagaactttcttcttggcaaccaaggggtctactctgccccctcactcctatgtctcttccacctgagactctgtcaccacctcccctagaatccgtgagataccttcccctgaattagagcataccagccagggtgctgaggcactctgtggtactggaatggatggtacagggatgcgtttctgggcttctggctgcaagaagcctcatcctttcccccagtgtaaagcattgctgggaatcatcccattatgagctactatttactgaatgcctgacacgtaccagtggccattctcttgtcttttatgtaatcctcattcagtgattacacacatcctaataataggtagccgatattttgcccattttacaggtgaggaaacagaggcttgggataagtaaattatccaagattatatagccacgaatgacagagctagagtttaactcaaatctgtttgactctagggccttgttattaaccgtgccaccaccatgcctcctgcattctgtgaaggaagacttcacacctcaaaggccatctgtttggcctttggtttgcccatcctgagccttcttaccatagcgaccatggcatggtgactcagcacttctgaagagatcagcagagtcattgggttgggtggcagaatacaggtatggcagggagggaaggagaaacttagggggactgtttattgcgcatacagttagagagaaagaaaaatgtatcatcaaaccatagaataggctgcttaaaagtttttctcccaagaaactgtgagtgtatgagggtcatgggcagctgcccccagctggcagagggcaggattttgtactgtgatgtaccagggtgtggacacgggcaggagagcacttacttttgggagtggaacaagactccaagtgcaaccaagtaagtacccaaacttaggctctggccaaagacacagaaaggccctactctgctttcttagatgatgaatctgtacttcctgaactaatttttcatgtttctttatgaggcttgaatatcttgaaattttaattcctagccactagcttaatagtctgttttctaacggtagtatttgccaatgggaattggccatttcatcattgcagagacagattcctttgagacaaaagatctttatcagaaaagaaactgtgactgattatgccaaaagatttatttttgttccatttagttttcatgaaaggtgatgaattatgcttcccaaagactctgggcattggacacactttctcaaaactgcacatccaattgagagatataggaagaacttagagcctaaataatgccataaaaataataaaaagtttgtaaaaaggaaccatatagaaattaaagaagaaatgaaatagtcttaatgaaagaagataacagaactgcattagaaacgaatggaaatatttagagggtttatgtattcaacaaatatttattggacaattattttattccaagcactatgttaagtgtgaggaagggaatgggagggaagggaagggaaggaaaggaaagaaaggagaggaagtagaggaaggaccgggagggagggaagaaggaagaaaaggaggaaaggagggaaggagggaggttctctttcatccagggaaggagggagagtctctgccatctgggagctcagagtgcaaacagacaactatagcctattgtcaccacgtcatagtggaggtacatgcaagttgcaatggaagcacaacagaagacatgactagcctccaattctcattgcctggtacatacacacatcctccactataccttaagctccatgagggcaggaccctttttcatcctcacagctctacagctcagcacaatgcctggcacataggtgtcaccaaacaaatgattgtggggaaaaaaatgccttctggctagatgagttatgatttatacattaacaaatattctctaacagagagagttgttagacctcaaaaccaggagattgcagaatccatccagatgtctgtggtgggagaaggcccatctctcagggaagagcacctctgtatttatctgttcatatgtgtgcttcatcaaagcctcttctcagccatggttcaggctgaatttataaagcttgaaacctatcgtatttctcaagaatcagagatcagaggtggaaggtttacaatatctcgataagtaagcagtacaaatgagttctagcagtaaaaaagaaagaggtctaatgataaatatatgaagcctgtctccacttgagagacctcctagaaaagatttgttctaaggaaacttttctccattaggagcagaatcatcttggaaatatacagctccaagttgtgttagaaaggtgtgtacaaagaagaccaaaaattcacatttggaataaggcattaaagttgccattgtttctagtagggaaaccctgcaaagtgttggggcatcgtagatcctgcatgttgacgcctgcaactaatctgccccggagctgttccgacagtggctggagcatttgctgcacagttgcataggtgttcaacaattgccaaaataaaatgaagctatttcgtgatgattagaaagaaataatcagcatcaatgaggcctctgatgcatcttcaggagtgagtaggtggaatgaagacctggtaggtgagacttttctctcttgtcagagaaagtttgacttgggggagcctggaaaacagggacaggagatggagtgccccagccaggcttgccctgcccaggtcagagttcttgtaaagcaccatctgattgtgtgttttctggtggctacaataagctgatttttggagcagggaccaggctggctgtacacccatgtgagtatgaccctgcaagtgaccagtgcaaaaagaactgaccacttgtctatgagaaaacaggtgatgatctatagcaaacttggggatatattgagaagcactcattttccattcctacaagctctcttggtgacttaaaatgttcccatttctcatatgaaacacagaagtgccaagagccaattgcgtaaatgaaaatctgagcagaataatttatagaaacataaaaagagttccaaataatgagtgctttcaagcgaagctgataatatcggcaccagataatctgaacattcaggaaattagctaagtgcccttgggggaaagagatgagttaatggcaaacacaaattctcttttattgcagcatgtagctaaattccctggattggctaataaacatggtatggggatccctactcatagaatcttcctctctggagttaggagagttttcagcttcctcctaagggtaaaagtggcccagacccctaactgaacggcaagtataccacatgcaattacaaggtatagaggcagcaatgtagagggaggcccacagacctggggaaaatctgggctctactctcactggctgttttcaataaagcctccactttctcagcagcaaaatgactataactacatcataataatatgagataatggccagaatgtaaaaagtgatcaataagtagtagcttttctaaaatattattataattattattattgaggctttgcttatactaaggtttacactatcataaagggaaaggagaatcgcttccttgggaaataaaagatgtaagcaacaaagacccaaggagccttttagaatgttgctctgggaccccagtggcttccagcagattagcatcaagaaggttatctcaaagaccttacccacagtgggggtacagcagtgcttccaagataatctttggatcagggaccagactcagcatccggccaagtaagtagaatgaagcaggagagcaagggaggacggacaactatttcttctttgtccaaaatgccaacttgaacccaggtattttcctctgtgggctccaaaatggtttcttccacccatccccagaaaatcctcccatccagctctcggtgctctgcagacatcatccttaggctgggaccttaggaaccatgaggcaggcaatgagcgagtactcctgaaccttccacaaacatatccaagatactgctgcctggaattgaggtttttgttctagggaattattggtttattgaaatcatatgaagtcacaacctcagcccagggaatcacagcagaatggaacaggaggagaacttttgtatcagaagcgaaatttcagtgcaaaagagcagaaggtttaggcctggcgtggtggctcacgcctgtaatcctagcactttgggaggccgaggcagggagatcacaaggtcaggagatcaagaccatcctggctaacacagtgaaaccctatctctactaaaaatacaaaaattagccgggcgtgatggcacgcgcctgtagtctcagctactcgggagactgaggcaggagaattgttgaacccgggaggcagagattgcagtgagctgagatcgcatcattgcactccagcctgggcaacagagcaagactccttctcaaaaaaacaaaaaaaaaaaaaaaaaaagaaggtctaacccttaggagtgtgattatcctgttctcctgccttgtgggggagatcagtgtttctcttatttaagtaataggtaggtcctgtgagtttgtgcaatggtgtcacctacggtatgaatactggaggaacaattgataaactcacatttgggaaagggacccatgtattcattatatctggtgagtcatcccaggtggcaccacgtgcaaccccatgggccagtgtcactaatcctttctctggagatatcacttattactatggtgaggcttgctgtagatgttgtaactaattttcttacagaggtctgggaagggaaaagcattactatctatcttgaatattcatgtttctctaggtcaaacacattaaaatttgactttaatcattcaatgggtattgtaaaatgccttctatgtgactatcactctataaaatgttagactgagtatgaagtgtgagatagattcctgtcctgtcctcaagtggtataaaaactagacaaaggtactgaactattgtaaattaagcagccagaaaactattttagtattgaccagttgatgatgtcaatggacacaatagagattcagaggggatagggtgctggctgagaagttggcctagactgagaagtttcctgtggtacaaaggattcattgagccctgaaggatggataagatctgtatgggcagagaaaggagagaagggaagttctgggcgtagggaacgacaagaaagaaggcatgatcttgggaataatcaaggcacatgcaaagtagcctaagtatacatctgataataaaattggttgaaaagtagtcagagaagatgtctttttaggcatggaaaaaggaaatactagagcattcaacagaatacagaaattagggccagggccagccattgggaaactgagaatccgatttagagatgcagactagaagtgaaggtgagagcagccagctatggtgccgcagacctcccctctccttcctcagtgggctctgagaggggtcatcccacaccttagaggaggagaaacctaagggattctgtaatagagacacggggcatggtatgaaagtattacctcccagttgcaatttggcaaaggaaccagagtttccacttctccccgtacgtctgcccatgcccagagtttcctgatgctcactaaagcctcggtgggacccagagtgactgtcactaattctgatttctgggtccctagtgcccaaacacaggggacagatttaatggtaaggaagctttcaatcactgctgtgtccctagggatctaaagcactagagcacatgtgcttctgcagttcattttgaatttaaaggacagcttaggatctagaatagctgaatttccacctcaaaacattggttccgtcttgccaagcctaccttctgatatcatcagtgatgggatgtgtttttcttactagggtagaataggatgtctctccccaaaggactctggcagacagacccctaaacacctccaaattaaaagcggcaaagagataaggttgaactagacgtacatggggataaaaagtataaaaggtacatgggaatgaaaggataaaaaggctaaaaaaattaagtacctctaactcagcccctgttgccatttctcagagtcttgtgttctgtggcattgcgctttctagaccaacagtgtccaatagaactttctgtggcaatggaaatgtcctgtcaatctgcactgtcccatacaatagccaccagctacatgtggctattgagctcttgaaatgaagtttccatttttaattgaaagcattttatttcacattgactaatttttatttcaacagccacatgtagctagagactattataccagacagagcagcctagatcttctccagtctgacacccaccagccccaggacttgagtgagtgtttaaccaggactcaaagttgggtttctgccccacaaggccaccccctttcctctttaaagccaacctgcatctggtggcccctgatcccctgccttgaggatcggcacttccagactcctctccccctctgcagtgctgtccagtacccccactgatgactaacaatcagggggatgtgttggtagagctaatggctttctgtctgtcccttcccagcaaaggaactatgccttagggccttcacccagagtgatgtcaggctgcccaagcatgaggagggaagtaggcagaatcctctggagccaaagctctggatgtctctcccctctgaccatggagcccacccctgctccactgctccagggacagccctatgctgcaggcagctctgcccccactcagcatcccaggggctgatttctttggttttggatccagctggatgtctgcattgccgaggccaccagggctggctcagcaactgtcggggaatcaccagggtctgagaaatcttgtgcgcatgtgaggggctgtgggagcagagaacactgggtgggaaattctaatccccaccctgctggaaactctctggtggccccaacatgctaatcctccggcaaacctctgtttcctcctcaaaaggcaggaggtcggaaagaataaacaatgagagtcacattaaaaacacaaaatcctacggaaatactgaagaatgagtctcagcactaaggaaaagcctccagcagctcctgctttctgagggtgaaggatagacgctgtggctctgcatgactcactagcactctatcacggccatattctggcagggtcagtggctccaactaacatttgtttggtactttacagtttattaaatagatgtttatatggagaagctctcatttctttctcagaagagcctggctaggaaggtggatgaggcaccatattcattttgcaggtgaaattcctgagatgtaaggagctgctgtgacttgctcaaggccttatatcaagtaaacggtagcgctggggcttagacgcaggtgttctgatttatagttcaaaacctctatcaatgagagagcaatctcctggtaatgtgatagatttcccaacttaatgccaacataccataaacctcccattctgctaatgcccagcctaagttggggagaccactccagattccaagatgtacagtttgctttgctgggcctttttcccatgcctgcctttactctgccagagttatattgctggggttttgaagaagatcctattaaataaaagaataagcagtattattaagtagccctgcatttcaggtttccttgagtggcaggccaggcctggcgtgaacgttcactgaaatcatggcctcttggccaagattgatagcttgtgcctgtccctgagtcccagtccatcacgagcagctggtttctaagatgctatttcccgtataaagcatgagaccgtgacttgccagccccacagagccccgcccttgtccatcactggcatctggactccagcctgggttggggcaaagagggaaatgagatcatgtcctaaccctgatcctcttgtcccacagatatccagaaccctgaccctgccgtgtaccagctgagagactctaaatccagtgacaagtctgtctgcctattcaccgattttgattctcaaacaaatgtgtcacaaagtaaggattctgatgtgtatatcacagacaaaactgtgctagacatgaggtctatggacttcaagagcaacagtgctgtggcctggagcaacaaatctgactttgcatgtgcaaacgccttcaacaacagcattattccagaagacaccttcttccccagcccaggtaagggcagctttggtgccttcgcaggctgtttccttgcttcaggaatggccaggttctgcccagagctctggtcaatgatgtctaaaactcctctgattggtggtctcggccttatccattgccaccaaaaccctctttttactaagaaacagtgagccttgttctggcagtccagagaatgacacgggaaaaaagcagatgaagagaaggtggcaggagagggcacgtggcccagcctcagtctctccaactgagttcctgcctgcctgcctttgctcagactgtttgccccttactgctcttctaggcctcattctaagccccttctccaagttgcctctccttatttctccctgtctgccaaaaaatctttcccagctcactaagtcagtctcacgcagtcactcattaacccaccaatcactgattgtgccggcacatgaatgcaccaggtgttgaagtggaggaattaaaaagtcagatgaggggtgtgcccagaggaagcaccattctagttgggggagcccatctgtcagctgggaaaagtccaaataacttcagattggaatgtgttttaactcagggttgagaaaacagccaccttcaggacaaaagtcagggaagggctctctgaagaaatgctacttgaagataccagccctaccaagggcagggagaggaccctatagaggcctgggacaggagctcaatgagaaaggagaagagcagcaggcatgagttgaatgaaggaggcagggccgggtcacagggccttctaggccatgagagggtagacagtattctaagtacgccagaaagctgttgatcggcttcaagcagggaagggacacctaatttgcttttcttttctttttttttttttttttttttttttttttgagatggagttttgctcttgttgcccaggctggagtgcaatggtgcatcttggctcactacaagcctctgcctcccaggttcaagtgattctcctgcctcagcctcccaagtagctgggattacaggcacccaccaccatgcccggctaattttttgtatttttagtagagacagggtttcactatgttggccaggctggtctcgaactcctgacctcaggtgatccacccgcttcagcctcccaaagtgctgggattacaggcgtgagccaccacacccggcctgcttttcttaaagatcaatctgagtgctgtacggagagtgggttgtaagccaagagtagaagcagaaagggagcagttgcagcagagagatgatggaggcctgggcacggtggtggcagggaggtaaccaacaccattcaggtttcaaaggtagaaccatgcagggatgagaaagcaaagaggggatcaaggaaggcagctggattttggcctgagcagctgagtcaatgatagtgccgtttactaagaagaaaccaaggaaaaaatttggggtgcagggatcaaaactttttggaacatatgaaagtacgtgtttatactctttatggcccttgtcactatgtatgcctcgctgcctcattggactctagaatgaagccaggcagagcagggtctatgtgtgatggcacatgtggccagggtcatgcagacatgtactttgtacaaacagtgtatattgagtaaatagaaatggtgtccaggagccgaggtatcgtcctgccagggccaggggctctccctagcaggtgctcatatgctgtaagttccctccagatctctccacaaggaggcatggaaaggctgtagttgttcacctgcccaagaactaggaggtctggggtgggagagtcagcctgctctggatgctgaaagaatgtctgtttttccttttagaaagttcctgtgatgtcaagctggtcgagaaaagctttgaaacaggtaagacaggggtctagcctgggtttgcacaggattgccgaagtgatgaacccgcaataaccctgcctggatgagggagtgggaagaaattagtagatgtgggaatgaatgatgaggaatggaaacagcggttcaagacctgcccagagctgggtggggtctctcctgaatccctctcaccgtctctgactttccgttctaagcactttgaggatgagtttctagcttcaatagaccaaggactctctcctaggcctctgtattcctttcaacagctccactgtcaagagagccagagagagcttctgggtggcccagctgtgaaatttctgagtcccttagggatagccctaaacgaaccagatcatcctgaggacagccaagaggttttgccttctttcaagacaagcaacagtactcacataggctgtgggcaatggtcctgtctctcaagaatcccctgccactcctcacacccaccctgggcccatattcatttccatttgagttgttcttattgagtcatccttcctgtggcagcggaactcactaaggggcccatctggacccgaggtattgtgaagataaattctgagcacctaccccatccccagaagggctcagaaataaaataagagccaagtctagtcggtgtttcctgtcttgaaacacaatactgttggccctggaagaatgcacagaatctgtttgtaaggggatatgcacagaagctgcaagggacaggaggtgcaggagctgcaggcctcccccacccagcctgctctgccttggggaaaaccgtgggtgtgtcctgcaggccatgcaggcctgggacatgcaagcccataaccgctgtggcctcttggttttacagatacgaacctaaactttcaaaacctgtcagtgattgggttccgaatcctcctcctgaaagtggccgggtttaatctgctcatgacgctgcggctgtggtccagctgaggtgaggggccttgaagctgggagtggggtttagggacgcgggtctctgcgtgcatcctaagctctgagagcaaacctccctgcagggtcttgcttttaagtccaaagcctgagcccaccaaactctcctacttcttcctgttacaaattcctcttgtgcaataataatggcctgaaacgctgtaaaatatcctcatttcagccgcctcagttgaacttctcccctatgaggtaggaagaacagttgtttagaaacgaagaaactgaggccacacagctaatgagtggaggaagagagacacttgtgtacaccacatgccttgtgttgtacttctctcaccgtgtaacctcctcatgtcctctctccccagtacggctctcttagctcagtagaaagaagacattacactcatattacaccccaatcctggctagagtctccgcaccctcctcccccagggtccccagtcggtcttgctgacaactgcatcctgttccatcaccatcaaaaaaaaactccaggctgggtgcgggggctcacacctgtaatcccagcactttgggaggcagaggcaggaggagcacaggagctggagaccagcctgggcaacacagggagaccccgcctctacaaaaagtgaaaaaattagccaggtgtggtgctgcacacctgtagtcccagctacttaagaggctgagatgggaggatcgcttgagccctggaatgttgaggctacaatgagctgtgattgtgtcactgcactccagcctggaagacaaagcaagatcctgtctcaaataataaaaaaaataagaactccagggtacatttgctcctagaactctaccacatagccccaaacagagccatcaccatcacatccctaacagtcctgggtcttcctcagtgtccagcctgacttctgttcttcctcattccagatctgcaagattgtaagacagcctgtgctccctcgctccttcctctgcattgcccctcttctccctctccaaacagagggaactctcctacccccaaggaggtgaaagctgctaccacctctgtgcccccccggcaatgcaccaactggatcctacccgaatttatgattaagattgctgaagagctgccaaacactgctgccaccccctctgttcccttattgctgcttgtcactgcctgacattcacggcagaggcaaggctgctgcagctccgctggctgtgcacattccctcctgctccccagagactgcctccgccatcccacagatgatggatcttcagtgggttctcttgggctctaggtcccggagaatgttgtgaggggtttatttttttttaatagtgttcataaagaaagacatagtattcttcttctcaagacgtggggggaaattatctcattatcgaggccctgctatgctgtgtgtctgggcgtgttgtatgtcctgctgccgatgccttcattaaaatgatttggaagagcagagactgtgcctctgtttgactgggtttggtaggagtcattttctgcttgctggtgatcactagctgggcagagaaaaaccaaggcatttgtctatgatgctgtccaggaagcctcattcaacaagctgcctaagtcaacctcttcttggaataacctctaaaagcttccgcttagcaggctatgctaagggccaggaaaacccacctaccagcttggacccctcctctcccactctcatgccacgccacgggaccacccataacaggagcccacacacatgggtggcagtgacctgcggcagacagggaccacacagcaagtgtccccaaaatgccacccactgtctcctgccctccaggagcatttcctttgcctctcctctcagactgggtttccactgaaactgtgcattgtctcacaaattcgtggctggggaccacccaccactctgctgcctgatccagccccacgccagccctttgaggtgcccaagctgacaccaggagcaaggttgagaggaagctgtgaccccagcaggactttatgttcccaccatcccggatgtgagaatgaggaaaaaaggagatgagctgtctccccacaagcccagagatttgaccgaggagagtagaggcctcgagctctcacctaagagaaaagacatggggctccctggggtccacagctcactgcgctctccctcctgagactcctgctgccagagcacctttccccagggtcatggatgctgaagggaacacaacttagagaccactccaccatccacccagcaagcacagctaccaagacccaaagctgaggcttaccaacgcccagggtgggagggggttccatccctgaataactccatggttcccctatgcgtctgaccatcccagccagaaatacataaatcatctcagctacaattcaggcctgcttcttttcatagggatgaagctacaggttgagtatcccttatctgaaatgcttggtactagaagtgttcaggttttggattttttttttttttttttgaggctggggatggaatattagcattatacttaccaattcggcatccctaatctaaaaatctgaaatccaagatgccccagtgagcatttcctttgagcatcatgttggcatttaaaaagtttcagattttggagcattaccaatttcagatttttgaattagggatgcttaacctgtaccagctttaataggtgacctagagcacatccctcccctctacaggcttatgtgttgccacttacgaaatgtcgggtaggactggaggctacctcccactccctgcacctctgattctgtgacccctgtagaattaagaaccagtgtcccttctcctggtcagccctactgacgggagtcacagaatccccagttctttctaagctgccccatctctcacctaaatacaatccccttaaataacaccaaagggaaagggctcagacctccatcacagcagggtcactctcgcacgtggtaggaccataccaccttcacaaaggcggggtttgccacctttggggagctctggggggcctctacctcctcaccagtctgacacaatgccagagattccaccactgggaatttcttataattaaagcattctcttccctgtattaaatgaaaatgcccctgggagagttaatagagcaagcctttatcaaccattaaaaactgagggccagttagtttctctttcttttccccctgaagtggtacttcattttgttttatagaaaaaagattcaggcaagggaagtgtgggtggctggggaggcaggtctgctcctttgagttggctgcagtgacatggaagtcacagggctgagggaaggagacaagagcctggacagcagtgaaggggtcaaagacagacccctccaagaacctcagaggagacccggactgcaggagacctgcaggaggcccgcgggagcctgtggaggcctgtggaggcccgcgggagcctgtggaggcctgtggaggcccgcgggagcctgtggaggcctgtggaggcctgtggaggtctgcgggacgctgtggaggcctgtggaggctgcgggagcctgtggagcctgtggagcctgtggaggctgcgggagcctgtggaggtctgcgggagcctgtggagcctgtggagcctgtggaggcctgcgggagcctgtggaggcctgtggaggcctgtggaggtctgcgggagcctgtggagcctgtggaggctgcgggagcctgtggagcctgtggagcctgccagcccagtgccctcaggcagcaaagcccagcagtcactggtcccccaaggccgcccacagatctatgcaaggtgatgcagcaggggctatggacccacccacacccaagcagggaggcacgatgacaaggcccgggcaggtagggggacatccggaaagcaggctcagctccacccctgagaaatttccgtctaaatccaggagatccttgattcagcaagaaccttccctcatgtccgaggctgttaaacctaaagccagttagggcagaggtcagaggggtggaccaggagcaagtgggtcgagggtgagcaagtgttgggagtggggatagaaactccatccatctccgactgctctgctcgcatatctgctccagggcccacctggtatgtcagagggaattagaacggccttgtgaggaggctcaggagaagggctcctgtgcccaccggccaggtcagcactggcctaacgccaccacagcaaagcccctcagtgcagagggcccagctatacggaactgggcattgcttagcctggagggaataggcagctgaggagacctggaaaacacagtcatgaagagactggccatgaagacccacagaccctgcgagccaaggccttgcgtgccatgcagctgcagctctaccagcctggacccaacctcaggccgacatccagcagggaacatgttactaaggccagttgtagaagggacttctctggacacatgccctactctcccaaaagacttaagcacaggccagtcccaaaggcagaagaatggactaaatgagctcttgtggccccagccctaagattctagaggactctctgaaacttcacttgaagacttgacctctgagtgcaactggagtcacagccactcaggagaaagggcaggctatgcaagcacgtgcttcaggagcatcctggtgaggtcttcagctctgacagagcaacccctctgctgctaccctcactgggggcagccatctgagtcttaaggagttgcttattttttaggtccaaacataaaattcaactcccctgggatcacgtatacagacaggcctatagcaccttattatcaggtaccatcctagtgtggaagtcccctgacctgtgtgctctgtgggatgggaatgtcccttgtcatcaatgtgtccccaggaactagaacagtgcctggcacacaacagatgccgttaaatgaataagtgaatgactcctgcagttaggctctgggtggggggagctgagtgtgaggagtggggagtacaggagaaaggaaagtggggattagtagaggaagtggtcaggtgagtcaatgcttcacagttttgccaagagctaaagtaacttgtcaagaacttcagaacaaggaaagcctgagtggtggccccttgctcagggcagcccccaggcaggcacacatctatccaacaaagcctggaggacagggactgtggtaaatcacgcagggtacctgggagtctgacctcactgtgtgaccacactgaggtccagagccaacagtcactttatgtgggttcgcctcagtttctccatgagtcctactctaaaacccatctacctccgtgagccatgtgtgggaagacgagcttctgactgggatgagtctgggggagcaagcacatggagacccagtgctgtcattctggctgccggaaggctgcaggaccaccagcgccctgcgtctgtgtcaaggccacctgggcaacgcggcgaggggtggggagtgcaggcctcctttcacacagagacacacaggcctgaggcctctctgggtagcacacatagagctatattttgcaattaataaacaggtcagacattgagtcagtagccacaagtagaacaggaagtggaaaaagtctcccacttccctccaggtgtttgggggctggggcggtcccctcccatttccatgacgtcatggttaccaagaggggcaagtagggcaccctttgaagctctcccgcagaagccacatcctctggaaagaagagtttaaaatactgagttagagatagcatcgccccaggccacgtgccgaggggagcaggctgggccgttacaccaccccccaaccgcaggtgcagcaaggccaacatgccaggctgggaggggctgccggcccctcggtgacttgcaccgggcccgcagtcaggctggggaggtgctgctggccccaccgctgagccgcctccctcaccgcacctctgctgcccctccaaaccagccaagatcagaccttgatctcacctgattaagcgcttgcttagtacagggcagaccctcgagacttatgctcaggccagtgtctcctgggagggagggaggtggggaggccgtatttgcccccacacagagctagggctgattctctgagggacccccccccaatagcacctccccccttaccctgatgcttgtccattaggtgatggccctaatggacgccttgatggacacgtccgggacccagggacccggagaccaggaatctgcaggtctcagggagccgcagaacctgaaacccaaaaataccaggcttgatcgcctgctcttcggtagtgtcgccatccacccgcatgggggcagcagcgctccaccaaaaagacctcttctccctttgtctgttaattctggagatagaaagcccccaaagtttaggaaaagctcttttccgaggaaaataaaagggcaggtgacttttatcccacaagtccctgccctgtgcccgtcactgcgctgggcgcaaggcctgtgtcatcctgtcacatccccccgaaaggagaggagggcctggggcctgggccggcagcagggggcgctgttcgtccgggatcgtcagacccgctccacccggagccccggaggaagtgcccagggagggctgggggcccggaggaggccttgggttcggaattaggctggctggagtccggatccaccacatcatacactcgtgcctttggcaggtcactaaccgcccaccgcctcagtttcccggtgggacgaactctctctcacaggtagtttaagaaccaggctttctttggcattgtatacctgccatgtgccaggctgtgtcgtgctctggggattcagtctctgtgcaaactatgactccatacagatgaagtccaagaacaggcaaaacgcatcacaggtgatagaaattagggcactgtttgcctctggggtagaaggatggattgaaaaggggcacgaggaaaccttcaggggtggtggaaatgttccatatctttatcttgggtgatggctatatatatatcaaatgcatcattagtgtattttcatgtaattatgcctcaagaaagtactgctcccattaaatacacacacacacacacacacacacacacacacacacacacagagtttctgtcttcaaggagttaacagtccagtgagtagtgggtatgaaagagatgtgttaatggctgcaattgcaagacagaggcttttgttactatattctcctcaggcaggagtcctcaggcaggaggcaggagaaccagttgtttgtccctaagcgtcactgcccctcactagccttctctcctggggcctttaatttttctgagtccccatgtgttattattcacatagagataaaaatacctgcccacctattctcagtgttgttgaagggattgaaagcagtaatgggtgtggaatgcttagtaaactgaaatcccagtgcaaatatgaagtgggaatgcatcagaatgcccaggaagacgaaccatgacccgaacaagatgggctgggccaggtcagatggcactgccatactgagaaaaaagtgggctggctgcggcttcacacagcccgggagagctcagaactccccaggccctgccggtgcgctggtgtttctcatagtatgtggccacctctctagtcacttcggccctaggagcttcttgttacaccatgattttgtcactacctccgcagcttcccacctcctgcttccggcttccagaaggaagcgcgtgatggaggggaaatgacagggccaggaggcagcggtcaggctgggccgagtttctgacagaagccaacacttctggccccacagtgctcacggcctccctgactcctcaccacatcacagctgaaaaggctcacgtcttatctcccctctcaacctctgggggcttctctgctttcagaaggagcccctggagcccctggccgaacacatctgaaagcacggagccagacctctgcagcgccctccagcgggcaggttctgcgggcagccatctcctcgcaggccagaacacgccacgtcactccaggacggttcgccacctttgagaagagaggactccagtgtctgttcgctctggaaatgtgggcatgttcccattccaaaggtgataggatctgaggggaggatccttcccattttcaaagccttcctaaaatcccactgattagtggggaggagtgcaagtctaccctttccccgaaccacccacatgaaatttagcaacaacaacaacaaaaaaggaaaatattagaggaagatcatataagtgtaagaagacaaggctggcaggacctaagagagtctaggtagatgaaggaatatggtttacataatggggagcacctggtctccatttcatgcttccagccttgatgggaggaaagtaggtaaaccttaaaagggacttctttccagtggaggctgcaagattctatttttaccaacctctaaggtgtccaccttatccttgctgacccaagttattccagtgatttaccaagggaaatgggtggaacgacatccttatctggactccttattaacaatatcctacatctgtacaacaccaaagcaaacatcaactcttttgatcaaaatgataaaccccagtggtagacagagtattctctccccttttacaaatcagaaggcacatggagcggcttgcacaggatcacggtgaactaggccctgatccccaccagactcggatcccaggctttccaccaagctctgtggactcagaaataccaagtggttccagattcagccatcagaggaaggagcatgaattgactggcattcccaggccccctaagactaagtgtcttgtttcctgcctccgtggcccttccctcttcctgactctgcctgcatggatttgatcccccttcaggatgagatcagaatggcaaggcagagctctgtacctttaggaggcactccctcaataaatatttgatgttgtcgggcacggtgctcacgcctgtaatcccagcactttgggaagccaaggcgggcagatcacttgaggtcaggagttcaagactagcctggcaaacatggtgaaaccccatctctagtaaaaatacaaaaaattagccgggcatggtggcgggcgcctgtaatcccagctactagggaggctgaggcaggagaattgcttgaacccaggaagtggagattgcagtgagccgagatcgcgccattgcactccagcctgggcaacagagcaacactccatctaaaaaaaaaaaaattgatgtttgtggcctcaaggcaatacttatccactactcaagcatatgccaatggggataactaatatccagacacactccccatggctggtcccttcgctgactctttcttagctgtcagatctcagcctaaaggtcacctggtcagagaggtccttcctaaccaccctaagcagctccctccccagccccatttactgtcacattatattgtttactgtttctttccttcactccactcacaacaaaattatttcatttatgtaataatttggctctcttccctaatggaatttaaggctcagaaagtgaggcgccttgtccgttctgatcatttctgtagcacttaattcatggtaagcaaaaatttaaaggaaggagtaataacagaaagaatgagctctgccatcagatgtctcttatttataccctgacactagattggggttaaatgttgacaatcattgaagctgttagacatatgggagcttgctggcctcttgacgtgcatgtatacgcaggcatgagggaaaatttcaattaaaagttaaaaacaaagttgtttatccctgggatttaacaggcctgaatagcaggtctcaaacggggctcctagggaggtctctccgcttctcccaggaagagccaggcctgccattggtcaccacagtgctttagctgaaagtcagtgaaacggatgtgcagctgagggagaaaagcagtatgtcatggaaccctcagagcttctggtgagcactgaaaggaatgatacatttgtagagcaattacattcagatattttcacttaacgttttgttgggataaccacagtatgaagtattattatccccatgctgagtttatgacttatctcattcaaagcgtaacccaaacgctttcagctagacagaaataagattcaagcctaacacttgctgagtctccatttcctcatcaggaagataagaatgccacccacctccttcatgcaatgatagggaaacgcaagtaacaggagggcgcttaacagtttgccagacatgtggcccacgctcgctcactcctggacaggatagggctgtgtcttatcttttctaatgccatgcactacctagcacagagcctaagtgtgtaattatttgctaaattttagcgacaaaaggtcaacagacagtaagtggcagaacaagtccttgaatcaacactttcagatcaaagtgttttccgcaacaccaggctgcctctctggtggtttgaaaatactttttaaaaatcccattgacagaacttggacctacctataaaatcaatgtaagcaaataaaatactttgtttagtccttcttcataagcttcctcccacttttttcctactctctcctctaagatccttgttctagaaagtgttttctcccacaggagaaatctattttttatatttgttaaaaacttttaaattaaccgtagttattaagtcatttcacacacaaacttttattacagacgcccagagctgagctgcaacccaacaagataggagagcagcagagtctcccgctaagtttgcaaacaagctccctggcctctataacctccaacaccagggagcacgcctctgtgacctccccaagtattttctagccatcacaacaaaagtgttttgaagcccaagatgaaatgatgtgatcacaagaggccgaaggtataggctgctaagagaagaaaacaagagagatggtttccatgtgataggggccaggaaatgtgtgggcaggaggtgctcagggctgggcttcccaccactgcaaagaatggcagggaatagactttccacagtgtttgtggtgaatggcttccggccccataaaagagcacagaaaataaaaataaaccaccccatagaggtgttgagcaagggggagcaggaaatgctagggtctacctcactctccatgcagtagtactcaaaatcaactccttcaacatacttcagctgaaaaaacacctaagaatcagaaacgcaatggggcttgggggcgtgtctttaagttcaagacagggtcttgttctgttgcccagactgaagcgcagtggtgcaatcatgcagtctctacctcctgggatcaagtgactctccaaactcagcctcccgagtagctgggactacagaggtgcactgccacgcccagctaatttttttaatttttgtagagacagggactcactgtgttgcccaggctggtcttgaactcctgggttcaagccattcttccaccttggcctcccaaagttctgggattacaggtgtaagccactgagcacctggcgctttttcagtgttgtcttttttttttttctttttgtgatgaagtttcgcttctgttgcccagggtggagtgcaatggcacaatctcggctcactgcaacctccgcctaccaggttctagcaattctcctgtctcagactcctgagtagctgggattacaggctcatgccaccacgcctggctaatttttgtatttttagtagagacagggtttcatcatattggtcaggctggtctcctgacctcaggtgatccacccacctcggcctcccaaagtgctgggatttacaggcatgaaccaccatgcctggcctcttttaagaacagggtcttacattgttgcccaggctggagtgcagcggctactcacaggtccacagctaattcttcagtacatgtcaaattgagaaccataaagcaaatcaacagaagcataaaaacaagagttacctataatgagcctttaactaaatctaatcccaacactccaaaagcagtctgtaggttttagccccgaagcaaatattgaaaagacacaccaaagaagaatgtttcctgttgatggtaactggcttgggtaaatcacaacctctgagacaatagctgacctggtaaatgggaatttaatacctgtcccatgtatctcaagatcattatgaaaaattaaacaaaacctatgtattaaagactgcaattacaatgtcttccttcataaaattactattattcccagttttcaacccgtgtctcaaagtccagatgcttttcttattcaaaattccaatttctctagactaaaaattatccggaagcctcctgatagggtctgtgacatctgtatataagttttaaaacagattaggccaggcacagtggctcacgcctataatcccagcactttgggaggctgaggcgggcagatcacctgaggtcaggagtttgagaccagcctgaccaacatggagaaaccctgtctctactaaaaatacaaaaattagccgggcatgttggtgtgcacctataatcccagctactcgggaggctggggtgggagaattgcttgaacccaggaggcggaggttgcagtgagccgagatcacaccattgcactccagcctgggtaacgagagcaaaactccatctcacaaaaacaaaaaagaaaaaaaaaagtgcagattaaactgctcagtcataatctcaatgaactagtatcacttaagaatggcaaaccatgacccacatagccacaaccaatttttataaataaagtgatagtggaatatagccatgcccatttgtttaaggaaaagcttgcggactcctgactcagtgtgttatcagttaggcagagagctaataagaaacatacaggcccaagcttttcaccaagttcctaggtaatcttgagacatgccaaactttgagaaccactgctgtagatgagagattctcaaatcttattgtgcacataaatcacctgaggaccttgttaaaatgaagatgttgcttctgtaggtttggggtgaggcctgtgctcccaggcgatgccaatactggtagtcaatgactacattttgagtagcaagaatccagagcagtgtttctccaatttgctgtgctctggaatcacctgggtagctttacaaactacagaagccaccccaagcgatttttacttaattggtgtgggttgtggcctggacgttgggattttctttttacattacccaagtcatgctaacgtgcagccaagttggagaagcttgaaactcatcattctcggtagttggctaaatttaagtagtggcattctcaacatagcttccgccccatatatagcaacccaacagcacccaagatgaaaacagggctgcgaacatgacagacttcagccagcagacctacattccacccaagctttgtcatgaactctgatcttaagcaagtcacaaatctgagtttcaatttcttcacctaactaatgaggacaggaacccctaagataattgcaagaataaaatgagagaatatttgtgaaggtgctttggaaaatattgtatcttataagtcaacacatacataacccccatttttcactctgtctacactgcctaagagaaatatatttcacttttaccactaaaacatgttgaaacagatgtaaatgtggtagcacatacttagttcaatttctagcagagtgcataatgatgcagttccaggaatgcactgtcataagagtggaagcacctgtaacaatcgaaggattagtaaaggattacctgctccaggaagaagacaaaggactgccatttcccagggttgtcagcactgccttttgccattaacttcaaatatacttaatgaaaacaaggaggcaggttcacagctgtaagttaccaactcataaagagttcagcacagaggactgaagagaaaaaaaggattctgataccagcaaagaataaaaacagagccagaggcatatggaggagtggcatggagttctttaatttggaaggcaaaaggttacatttaatgaaaggcagaggctggattaataaatgtttgttagaaagttgttctgacacacagtgaactctgggcttttctcctgcataaaaagcagagctagcagtaagtgcaaatctgaagaaaatccatgtgtccaataagctgccatctccag

SEQ ID NO: 22665 - DNA, 111597 bp, Homo Sapiens
aagcttccagaaaactcatctcagtgacttgattatgaaatgctaccagtttgaagcagtcactgaaaaacataaggtcataaatcaggaatccagaagaaacaatgaatagcaactttatcttcacttcacttctaacacaggctctccaaggtaacagccctatcctgtacccagagtggcccttctggagaaggtggctggtttgacctatgactgttgagtgttttacattgcagggtctgggagagcagactggatcaagccccaggagacagaagtatctggaacagaagggaagactgtgaacctactttgtaactatggtacatcatcggggagctatcttgatctctgctggttttgacagtatccgagccaggcatcagaatacattctctacagagggtggggatattctggaaaaggagatgccagttttgccataggaaagtttattcaaagagtacagcaaatgcaataaatgtgtacattagaaatctggttcctgcagacactgccttatattactgtgtgctgagatgcacaaaaagaacacttcctaggggtgtcatacaaaaacaccagcgcataggaggaaggagagcatttgttataaccacactgattttttttttttttgcaaaggcgtcattgtaagtggaagacactggatcaggagaattctgctttaataatagctatatatagtaatttgtaggcaaatagcttgagcttttagagtttccatttcctgaaattggatagcaattctaatttgtaagcttttatgagacatggttttaacacttggattaagtgcctagcatgtcctacatgctcagcaaatggcaaatatcttttcttgctctccctctctgtctaactactttgacctcaaaggacccttctttcactatctgagaatcttctatatactcctactggtaaaataacaacaacaataacaataataataataataaccctaaaaacatacatgcaagacctagatagagaaggcttctttgcccagggatcaatggtcattgtgccaggattttaaaagtgtatgctcagcaaatccaacaatcagaggacaaaaggaccccgagacactagctcctgagttcatagaccagggcagttgggcatttatcgtgatctgaacaagaacaggagagagttcctcacaagactaaagagaagagaaagacatttagcattaggtgggtggtgggagagaagagagaaattcttgggaagactacagccatgttctggtgtcagatctgacctccctagatggagaagagaggccaagtgaggcagtgggtcctcagcccacctggtagaggaagagggcacctgccacttcctgcactggttcaaactacactcctaacagaatcctatcatttaatctggatgtgagcaaagcctagcatctttgtttggactggtgatagatgaaaggtaaaagaggaaggaagatttaatttagagccttattcaatagtctgcagcagcactagcaccttactgcttgcaggccggaaacctcaaggtctagcagttcacagtgaagcctgcaccacactggctgctgagtaactgccccagtcactaggagggcttggaaatcaaacagcaaatgacaccttaaaaaatatgtataaggccattcttgcactgttataaagaaatacctgagactgtgtaatttataaagaaaagaggtttaattggctcatggttctgcaggttttacaggaagcatggtgctggcatctggttggcttctcagaaggccccaggaagcttataatcatggtggaaggcaaagggggagcaggcatgtcacatggccagagcaggagcaaatgagagagagtgagggggaagatgcaacacactttatttaaaccagatcttgtgagaactcactcactaaagcaaagacagcaccaagccataagggatcccacctccatgatacaaacacctccccccaggccccacctctagcactgaggaatacaattcaacatgatttggatggggacaaatatccaaactatatcattccactcttgatccctcctaagtctcatctccttctcacattgcaaaacacaatcataccttcccaatagtcctccaaagttttaacaaattccagaattaactcaaaagtcccaagtctcatctgagacaagtcaagcttttccaccaatgagtctgtaaagtcaaaaacaagttatttactcccaagatataatgtgagtatacacattgggtgaacattcccatttcgaaagggagaaattggccaaaagaaggggccacaggtctcatacaagttcaaaacccagcaaggcagccattaaatcttaaagctccaagataatctccttagactccatgtctcacatccaggacacactggttcaagaggtgggctcccaaggcgttgggcaactccacctctgtggctttgcagggtgccacccccacagcttctctcataggttgttgagtgtctggcttttccagacacagggtgcaagctgccagtggatgtactattctgggatctggaagatggtgacccctttcccacagctctactaggcagtgcttcagtgaggattctgtgtggggcctccaactcctatttcccctccacactgccctagtagaggttatttgtgggggctctccccatgcagcagtcttctgccttggcacccaggctttctcatacatcctttgaatctaggtggaggctgccaagcctctttcactcttacattgtgtgtgcctgcaggcttaacaccacatggaagctgcccagagttatggcttgcaccctccaaagtggcagcctgagatgtacctcggcccctttgggtcatagccagagtggccaggatgtggggagcagtgtcttgaggctgtgcagggcagcagagtcctggacctggcccctgaaaccattctctcctcctaggcctcaaggcctgtgatgggaggggctgctgcaaacatctctgaaatgcctttgaagccttttccccattgtcttggctatctggctgtcttttagttatgcaaatatctctggcaagcagttgctttgaggcttgcttgaattcctttcctgaaaaatctttttctttctctcccacatggctaggctacaaattttccaaacttttacactctgctttttaaaatacaagttctagctttaagccatttctttgctactgcatctgagcataggttattagaagcagccaggtcacctcttgaatgcttcactgcttagaaattgcttccaccagatatactaaattatcactctgaagttcaaacttccacaaatccctagggcaggggcacaatgcagccaagtttgttgctaaggaatagcatgggtgacattcactccaattgccaataagttcctcatttccatctgaaatttcatcagcctggccttcattgcccatatcactatcagcattttggtcacaatcatttaaccagtctctaagaggttccaaattttcgctcatcttcctgtcttctgagccctccaaatttctcagacctctgcctgttacctggttccaaagctgcttccacattttcaggtatctttatagtaatgccccacttctcagtaccaatttgctttattaggcctttcatgcaccactataaagaaatacctgaaacttggtaatttattaaaaaaaaaggtttaattggcttatggctcttcaggctttacaggaagcatggtgctggcatctggggaggcctaaggaagctttcaatcatgacagaaggcaaaaggggagcaggcatgtcacatggccagaacagacacaagacagagagagtgagggggaggagccacacacttttaaatgactagatcttgtgagaactcactcactattgcaaagacagcaccaagtcatgagggatctgccctcatgatccacatatttccccccaggccccacctccaccattggggattataattcaacataagatgtgggttgggacaaatatgcaaataatatcacaataatttcttttataaaaaagtgaaaaatacttttattagagaataattttcaaagatctgtttaaaactaacttttaaaaacaatgaactatgggaaacattcactaatgcataaaataaaatatgtaatctttttcattttcagtttgtgcaaagttattttcacaccctgctggtagcaacacaatatattggtacaatcttttacacagtgaattacttggaaagggattttgagattcattaaacagttcatgcctttgaactgtttgaaactgaatgaacacctttgatccatttctcagaatttatattaaagattgattttaagtagaaaaaaccctctaggcaagaaaatagtaaaaatttctcaaccagttagaggaatttggatggcaacttgactgaatactttacaactatttaatgagttaataatactaaaaacatagtaatgctcttgacatacagttagagaaaacatagagttcctataataaccatatgctcacactaatatcgaatgaatgaagcacatagataaaaactggaagttttgatgcaaaactgaaagtatgaaattatttagtgtatgtacttgcaatattttaatttttattttttcatggaataactgtgaacttgtgcctacaataaataacattttaaaaattctcttgactccaaatgttgtagctagtggaaaaacaaacaaacaaggatctcaaccccagctctgtgcctcagctgtttctcctttcttcaactctggggcatcaattttctggttcccttcccttaactaagtcctcttcttcattattccccaagacctgctgacagaaactctgctgaaatattatttgtgtctcaaacctatctttgatatgggcaaataaggaaaaaactattttcagttcttttctattttctctgcagtagactcagtagctagaagattgagctgattgtaccaaaaattaagaattcttcattgacatcacatgggaaaaccatctccggttttccaagaaggaagattaggtaaggctatataccttgtcattttttttaagttggaacattaaagataaagcttaagtcctctctgctcatgttttcatctgttctcttttcccagagctaaatgttgctctgggtttgtgaaaggaaattaaatcttgggaccccaaactcattgagccaaagggaaaagttaagctgcgaactgggccatgcaaacctgccttgccctttcagttcctacataagatggctacaagatgaaaagctacatgactccaccatattttgcccacaaggaaattcctagtgagctgcaagatctttaccctatagtgtctctgttaaaatttcaccttggaaggccgggtgcggtggctcatgcctgtaatcccagcactttgggaggccgaggtgggtggatcacgaggtcaggagactgagaccatcctggctaatgtggtgaaaccccatctctactggaaatacaaaaaattagccaggcatgtggtgggcgcctgtagtcccagctactcgggggctgaggcaggagaatggtgtgaacctgggaggcggagcttgcagtgagccaagatcgtgccactgcactccagcctgggcaacagagtgagactctatctcaaaaaaaacaaaaaacaaaaaaaaatttcgccttggcaatgtaaactgatagcttattatctttacaggtgcagtcaacccctgtccaccagacataaatacacatctgattgttcccctgccccattttgcctatgttatcttgtgtaaaaatgcaaattccctgcattttttctctgccccatttatctatgtcatcttatacaaaaaaaaaaaagcagattcactaagccagacaaaggcatgaataactatttttccctacccttctcttacctaaaaattgtatacttctcaatatcccaccctttcccctttaaatctggagccctcaaaatcatcttcggagaaagtcatagacctgtctcctgggcacacatccttaactttggcaaacaaacctaaaatgattgagacttgtctcaccatttttctcaattgacacgtttataatttacattttaaattctttatctttattaatatgcacatataaatgtacatactcatgggaaatataaactatgattttatggcatttttaactaaatgttacatatgatatgtttttctccacaatttcctttcattttactcaacaaaatagacttgaagactagccaggttgatagagatcatctcatttccttttaattcatgtaaagtaaatcattctatcaatatgctatatttaataatactgatagtaataatattatttctccacaaagtagacaactaaggttcagaaagattaatttgccaaggtcacataattagtaagtggcagaatgaaagacaaatcaaatcttctgactttagaaagttcttctgtctttctcatttccaacatgtttagtggcaagagaaaggttttcttcacagaaacctaatatcccaagcaaatttgtatgtaggatttctcttgaaaattacctctcacttggctctgttcttatggctattaggcaataaatactaataataaaaataaaaataacaaaaacccctctctcccatattttggaaatttttcaatgcaacacaatggtcaatgttgttcattttttccctcatttctttgtctccaaccaaagaagcatatctctattttaattactcaacagtggggaatcaaactgattgggatataaacctaggcatttgagctggcaatggctaccctctttgggtcccctccctttgtatgggtgctctgttttcactctatttcactctattaaatcttgcaactgcactcttctggtccatgcttgttatggctcgagctgagctttcgctcaccatccaccactgctgtttgccaccatcgcagacctgctgctgacttccatccctccagatctggcagggtgtctgctgtgctcctgatccagcaaggcgcccattgccactcccaattgggctaaaggcttgccattgttcctgcacagctaagtgtctggcttcatcctaatcgagctgaagagtagtcactgggttccacagttctcttccatgacccatggcttctaatagagctataacactcaccgcatggcccaagattccattccttggaatctgtgagaccaagaaccccaggtcagagaacacgaggcttgccaccatcttggaagtggcctgccgccactttggaagtggcccaccaccatcttgggagctctagaagcaaggacccccggtaacattttggtgaccatgaagggacctccaaagtagtggtaatattggaccactttcactcactattctgtcctatccttccttagaattggaggaaaatactgggcacctgtctgccagttaaaaatggttagcgtggccaccggacttaagattcaggtgtgaggctatctggggaagagctttctaacaacccccaacccttctgggttggggacgttggtctgcctggagccagctcccactttcaactttcttggggaagtggagggctgactagaggcagaaagctctcatccagaactcccagcagtagccggttgagaccatggcgcagccagaagtctctagtcaacagtcgcccatacctcctgggtcccgaccacaactttcttgaaagtgtagccccaaaattctccttacctctgaatctacttcctctgatccctgcctcctaggtactaatggttcagactttcatttcctctagcaagttgtatctccaaagggatctaaggaagctctacactgtgtccttaggcacttaggctataacccagggagtcttatccctggtgtccctcccaatttaggtatacggctctcaacatgggctgttatgtgggacacattccccaccacccttgtcagggccccaagtttgtaatggctaagagagagagacagagagaagacagagagagagagagatggagagagagagagacaaagatggagagagagacaaagagggagtcaaagagaaaaagatagaaatagaaaaagaaaagtgtgccctgttcctttaaaagccagggtaaatttaaaacctgtaattgataattgaaggtcttgtccatgaccctataacactccaatacttttttatttacactttgttgtcagtgtaaataagggcttagcccgaaagcactgaggccactgacaacctgtagctttcctatcaaaaatccttaacccagtaacccacggatgggccaaatgcattcagtcagtaccggcaactgctttgctaaaagcagaaaagtaacttttagaggaaacctcattgtgagcacacctcaccagttcagaattattctaagtcaaaaaagcaaaaaggtagcttactaactcaaaaatcttaaagtatggggctattctgttagaaaagggtaatgtaactccaacctctgataattcccttaacctagcagatttcctaacaggggatttaaatcttaattaccatacaaaggtccgaccagacctaggaagaactcccttcaggacaggatgatagatggttcctcccaagtgactgaggaaaaaaccacaatgggtattcagtaattgataaggagactcttgcggaagcagagttagaaaaattgcccaatagttggtctcctcaaatgtgcgagctgtttgcactcagccaagccttaaagtaattacagaatcaaaagactatctcaatcctgactcaaaaggttacctacaccctctctgaaatgaatttgcataagaactgttgtttatgggaatgcatcttgatggggcagctgggttgttatgaaatactcaggaaactagcccagatctaggactcacccctgagagcaaaggcaatgttgggcatgctggtaaaggaccgctagaatccagcagccaggaccactttctttgtggtcaagaaaggtgggaaaacaggtgcaggactgctacactggtaagcataactaatccgataagcagaggtccatgggtggttacgcaccctggaaaggaataagcattaggactatagaggacactctaggactaatgctcatcggaaaatgactaggggtactggcatccctatgttcttttttcagatgggaaatgttccccccaaggcagaaatgcccctaagatgtattctggagaaatgggaccaatctgaccatcagacactaagaaagaaatgacttatattcttctgcagtaccacctggccacaatatcttcttcaaggggcagaaacctggcctcctgagggaagtataaattataacaccatcttacagctagacctcttttgtagaaaagaaggcaaatggagtgaagtgccatatgtacaaactttcttttcattaagagataactcccaattatgtaaaaagtgtgatttatgccctacaggaagccctcagagtctacctcccgaccccagcaagaccccaactccttctccaactaataaggaccccccttcaacccaaatggtccaaaaggagatagacaaaggggtaaacaatgaaccaaagagtgccaatattacacgattatactcgctccaagcagtgggaggagaatttggcccagccagcgtgcatgtacctttttctctctcagatttaaagcaaattaaaatagacctaggtaaattctcagataaccctgatggctatattgatgttttacaagggttaggacaatcctttgatctgacatggagagatataatgttactgctaaatcagacactaaccccaaatgaaaaaagtgctgccataacagcagcctgagagtttggcgaactctggtatctcagtcaggtcaatgataggatgacaacagatgaaagagaatgattccccacaggccagcaggcagttcccagtgtagaccctcattaggacacagaatcagaacttggagattggtgccacagacatttgctaacttgcgtgctagaaggactaaggaaaactaggaagaagcccatgaattattcaatgatgtcccctataacacagggaaaggaagaaaatcctactgcctttctggagagactaagggaaggattgaggaagcatacctccctgtcacctgactctattaaaggccaactaatcttaaaggataagtttatcactcagtcagctgcagagattaagaaaaaacttcaaaagtatgccttaggcccagagcaaaacttagaaaccctactgaacttggcaacctcagttttttataatagagatcaggaagagcaggggaatgggacaaatgggataaaaaaaaaaaaaaaaggtgactgctttagtcgtggccctcaggcaaatggactttggaggctccagaaaagggaaaagctgagcaaattgaatgcctaacagggcttgcttctagtgtggtctacaaggacactttaaaaaagattgtccaagtagaaacaagctgcccccttgtccatgccccttatgtcaagggaatcactggaaggcccactgccccaggagatgaaggtcctctgagtcagaagccactaaccagataatccagcagcaggactgaggatgcccagggcaagcgccagcccatgccatcaccctcacagagccttgggtatgcttgaccattgagggccaggaggttcactgtctcttggacactggtatggccttctcagtcttactctcctgtcctggacaactgtccttcagatctgtcactatccgaggggtcctaggacagccagtcactagatacttctcccagccactgagttgtgactggggaactttactcttttcacatgcttttctaattatgcgtgaaagccccactcccttgttagggagagacattctagcaaaagcatgggccattatacacctgaacatagcagaaggaacacccatttgttgtcccctgcttgagaaaggaattaatcctgaagtctaagcaacagaaggacaatatagacgagcaaagaatgcccatcctgttcaagttaaactaaaggattccgcctcctttccctaccaaaggcagtacccccttagacccaaggcccaacaaggactccaaaaaactgttaaggacctaaaagcccaaggcctagtaaaaccatgcagtagcccctgcaatactccaactgtaggagtacagaaacccaacggacagtggaggttagtgcaaaatctcaggattatcaatgagactgttgttcctctatacccagctgaacctaacccttatactctgctttcccaaataccagaggaagcagagtggtatatagtcctggaccttaaggatgccttcttctgcatccctgtacatcctgattcccaattcctgtttgcctttgaagatccttcaaactcaacgtctcaactcacctggactgttttacgccaagggttcagggatagcccccatctatttggccaggcattagcccaagatttgagccaattctcatacctggacactcttgtcctttggtatgtggatgatttacttttagccacctgttcagaaaccttgtgccatcaagccacccaagtgctcttaaatttcctcaccacctgtggctacaaggtttccaaaccaaaggctcagctctgctcacagcaggttaaatacttagggctaaaattatccaaaggcttgagggccctcagtgaggaacacatccagcctatactggcttatcctcttcccaaaaccctaaagcaactaagagggttccttggcataacaggtttctaccgaatgtggattcccaggtacagcaaaataggcagatcattatatacactaattaaagaaactcagaaagccaatacccatttagtaagatggacacctgaagcagaagcagctttccaggccctaaagagggccctaacccaagccccagtgttaagcttgccaaggggcaagacttttctttatatgtcacagaaaaaacaggaatagctctaggagccatcacacaagtctgagggactagcttgcaacccgtggcatacctgagtaaagaaattgatgtagtagcaaaggattggcttcattgtttacaggtagtggtggcagtagcagtcttagtgtctgaagtggttaaaatgatacagggaagagatcttactgtgtggacatctcatgatgtgaatgccatactcactgctaaaggagacttgtggctgtcagacaaccgtttacttaaatatcaggctctattacttgaagggccagtgctgcaactgcgcacttgtgtaactcttaacccagtcacatttcttccagacaatgaagaaaagatagaacataactgccaacaagtaattgctcaaacctatgccgctcgaggggactttttagaggttcccttgactgatccccacctcaacttgtatactgatggaagttcctttgtagaaaaaggacttcaaaaagtggggtatgcagtggtcagtgataatggaatacttgaaagtaatcccctcactccaggaactagtgctcagctggcagaactaatagccctcactcgggtactagaatcaggagaaggaaaaagggtaaatatatatacagactctaagtgtgcttacctagtcctccatgcccatgcagcaatatggagagaaagggaattcctaacttccgagggaacacctatcaaacatcaggaagccattaggaaattattattggctgtacagaaacctaaagaggtggcagttttacactgccggggtcatcagaaaggaaaggaaagggaaatacaagggagccaccaagttgatattgaagtcaaaagagccacaaggctggaccctccattagaaatgcttataggaggacccctagtatggggtaatcccctccgggaagccaagccccagtactcagcaggagaaatagaatagggaacttcatgaggacatacttccctcccctccagatggctagccaccaataaaggaaaaatacttttgcctgcagctaaccaatagaaattacttaaaacccttcatcaaaccttccacttaggcattgatagcacccatgagatggccaaattattatttactggaccaggccttttcaaaactatcaagcagatagtcagggcctgtaaagtctgccaaagaaataatcccctgcactgcaggccatacatttcaatccctgtatctttaacctccttcttaaatttgtctcttccagaatcaaagctgtaaaattacaaatagttcttcaaatggagccacagatgcagtccatgactaagatccaccacagacccctggaccagcctgctagcccatgctccaatgttaatgacatcgaaggcaccccctcctgaggaaatctcaactgcacaacccctactacgccccaattcagcagaaagcagttagagtggtcatcagccaacctccccaacagcacttgggttttcctgttgagaggcgggactgagagacaggactagctggatttcctagactgactaacaatccctaagcctagctgggaaggtgaccgcttccacctttaaacacgggacttgcaacttagctcacacctgaccaatcaggtaggaaagagagctcactaaaatgctaattaggctaaaacaggaggtaaagaaacagccaatcatctatcacctgagaacacaatgggagggacaatgatcaggatataaacccaggtattcgagctggcaacggctaccctctttgggtcccctccctttgtatgggagctctgtttttactctatttcactctattaaatcttgcaactgcactcttctggtccatgtttgttacggctggagctgagctttcgctcaccatccaccactgctgtttgctgccgtcgcagacctgccgctgacttccatccctccagatccggcagggtgtctgctgtgctcctgatccagtgaggcacccgttgctactcccgatcgggctaaaggcttgccattgttcctgcatggctaagtgcctgggttcatcctaatcgagctgaacagtagtcactgggttccacagttctcttccatgacccatggcttctaatagagctataacactcaccacatggcccaagattccattccttggaatccgtgaggccaagaaccccaggtcagagaacacgaggcttaccaccatcttggaagtggcccaccgccattttggaagtggcttgccaccatcttaggagctctgggagcaaggaacccctggtaacaaaacctgatgtttgttctctactaaggaataaaacaggcatacatgtgagataactataaagagtcaggacatgatagaggtctgcacactatatcagaagccctgtttccagctctgtggctgcagcatcgcacaactccagtgctctgcctgaggctggctgtgcatgcagagctgagccctaggttttggcaggacaagacatgttttattcagggagatgagaaggcctgtcaacatgtactgccccacctgctgcggccaactgtggcctccatcttccccagtaggcagggatggactgagggaggaaagacacctgcggcacatctgaaagatgctttgggccggggacaaaaaagaagtgatagaaaccaggctgtgctttttattgctgtcaggacaattttcttaggacatgggggtttcttttttttttcttttttttttttttgagacggagtctcacactgtcgcccaggctgcagtgcagtggcgtgatctcagctaactgcaagctccacctcctgggttcacgccattctcctggcttagcctcccgagtagctgggactacaggcgcccaccaccatgcccggctaattttttgtattttttagtagagatggggtttcactgtgttagccaggatggtctcgatctcctgacctcatgatccgccaacctcggcctcccaaagtgctgggattacaggcatgagccaccgcgcccggacaggacatgggggtttctaaacaaggctcttcagtatcagctcattgtgagtcacagatcagatctgcccagttctcttttgctgttgacattgttgtttcctctgcaggattcagcagtactgaaagggttattcagtcccaacatgggatctttacacaagaaggggagcttgtgaaatgcaagtactttgcaaatagctcaacttattttctttcttgttttgggcagcattccagtgaggaaatatttcacctgatttctcagagtttaggagcatccaggaacgcaaggaataaaaaatgttctgtgaacctgcaaatagctgccaacactgtcattctcaccatttcagttatgagaccaaaagactcaggaaacagtttctgtgcactcaagacatctacagtaagaggaacaataaaagttgtagttaaaaaaaacaaaaaacaaaatactcagagcttgtaccccagactcatctgccacagggactgggagagatccacgggccctaaactgaaaaaatgtgagcctgtggacagcattcatgaagtatggacaggaaacaggtaactgttgcaagaaaaaccctctcaaactgcattcattgagcagtgctttcaatccacagtccttaaattgactttctccttcaaattttagcaggtaacaaaacagtactttattttaatctaattatttttcttttttctttaactttttatttgatatatttcaaaatataaaataatactgcttattgtaatagatgaagtaataaaaagttttataaagaaaaagttaattctcactcatctgctccctactgaagtaaataatattaataacctgataagtgtcctttcccactattctttctgcttatataaatataggcaaaaatccctcctagtggaacaaatctgtttggggttttttttgttttgttttggtttggttttctgagacggagtctcgctctgttgcccaggctggagcgcagtggcatgatcttggctcactgcaacctctgcctcctgggttcccaccattctcctgcctcagcctcccaagtagctgggactacaggtgcccgtcaccacgctcagctaattttttgtagttttagtagagacggggtttcaccgtgttagccaggatggtcttgatctcctgacctcgtgatccgcccgccttggcctcccaaagtgctgggattacaggcatgagccaccactcctggccacaaatctgttaataaatgtgtgaccaattggaatttttcctctgaatcgccttttacatctttgtccatttttcttttaggttatatatttctcacttaaaaatgcatgctagagatgtcaaaaattttttttatttctccagtctattgtttgtcttctgattttgtttatagcacgtagcatggtatcctttgcctctaaatatactctaaactgtatatagttaaatatgcctgtcttctttatatcttctgcatttctaccatacttaaaaatagtacaggtttatataaatattcccagattcttagacaacagttttatcattttgctttttacaataaaatctttcaaccatctggaaactgtttttatatatgaaatctattttccactattgaaatgtctttgtcatattttatgtttcttaaacataatcaaattatatacatccatattaagaactttaccagtatccaaacattacagaataatgtaagaatcacagtggaactgggtgctggtgaaaataatcactgaattctccagtgccagtttgaaaggagaaattattagccattccactggggtgagaaaggccaatgagtttgactgatgttaaccaaagagagattaaaggatggactaaaagtataaaggggtgacatcttggggaaatgcaagtcttgtgcagagagaggaagatgtttaacttatcctactcaactcctttcctatatgaccggaggtgcctagtccagcttccacccactccactaagttgaggaatagctatcatcacatgtctggaagataatcagcttctgaactggcagagcgtctctggttcttgtggcaaagacataaaatgtgggagaaagtagagaaaaagaaagtgtggtagcctgcattcccaccttttattgaggcaatttttcatgtactagtggttttaatgaatctgtataggtctgaaccaacttgaacctgaacctaccctgcctccaaacagctgtcacttaggggaaggctctagcacaggaggctgtggattgacccatgtgtgaactggaggaggaggaggaggttgagcttgagaacgatcaccactccaggaaatcacgcagatgaagggccctgtagccccctgaagaaaacactagcacaccgttgtgagaaagcacacatttggatttctgccaccaagagggaatccatggccaggaagagataagaaccaacaggaaggagaaggaacctctccatcagaaccctgagaaattcacataaggaaacagcatctgagcaaccaagaagacaaggcccctcagcccaggagaggctgaaaagagagtcctttatttctcccaccactctgcccaacagctgagggttgacatggggtgaagtctgaaagaatagcacatctacctgtcagtggagctcccagagtcttcctgctgggtgtgggtggagggtagagctttgactctaaaatactaattaagttcaaaatgaatacacacatagttggaacaaaactgctttagtaactaaaagagaaaggataacctgtttcccagtggaaaagagatgattgataagtgaaaaaaaaatgaaaacaatttcacactcacatttatctcatgacttgaaatgctctagtcagcacagtaatatctggatctctttgggtattttctattaaatgttccgcttattggcttaatccttcacttatatcatattgttttgtttagagtagtttagagtaagtttttatgtcataaaaaaactgatcttaatattccttttcaagaatgcagttgaaagttcctagatatttgttctctcttatgcatttcatcttgttcaaacaaatggcattctgactgtaactactttggaaagtttaacattttaggacattatatttttccacaaaagaaaaatccatctatttaggtcttattttaaaagtaaattttgcatgtttgtttgtttcttacataccttccactttctttttttttgagacaggatcttgctctgcagcctaggctggagtgcagtggtacaatcatggctcactgcagcacagacctcccaggctcaaatgatcctcccacttcagcctctaaagtagctgggattataggcatccaccatgcctgactaattttgttttttagagatggcgtctcactgtgttgcccaggctggtcttgaactcctggcctcaagcaattctcctgccttgaccttccaaagtgcagggattacaggtgtgagccactgcacctggccagatttctgcttttcttattaaatcaattgctaaatattgtatcatctgtgttgcattattactgaaatttttcttcatttagagaaatttattccatataaggaaaaattactaatttttaatatttgcttaatagccaacaatttttgttacttgttgatttttagcagtactatgaccaaagtggcacatgtacatgtttattttttaaattcctgaatagtacagaaaagtctgtattacaaatctggtttcttatttctctccaactttcaatccttgtccataaatatttacacttttaagtctggatcttctagcagtgagctccatatttctaaataatatgttttaactacttcttgcaacatacattttattcttttattttatttacttatttttttagatggagtctcacactgtcaccctggctggagtgcaatggcatgatctgggctcactgcaatctctgcctccggggttcaagcgattctcctgtctcagcctcccgagtagctgggattataggcatgtgccaccacatccagctaatttttgtacttttagtagagacggggtttctcctcgatggccaggtttgtctcgaactcctagccccaactgatccacccgccttggctgcccagagtgttgggattacaggcatgagccaacgtgcctggctgcaacatgaattataggtgttacctgttgactttcgttttgttttttaaatagacttaattttttaaagcaattttaggttcacggaaaaattaagcagaaagtagagagtttcccatatacttccaggcctcacatatccacaggctcccatgctatggacatcttccaccagagtgataacatttgttccactgatgaagctacattgacgtattattattacccacagtccatagattacattagggttctctagtggtgttgtacgttacatgggtctggacaaatatataatgacgtgtagccgccattacagtctcatacaggttgtttcactgccccaaaatcctctgtgctctgcccgttcactcctccctccccccagctcctgacaaccactgatcttgttactgtttccatggtgttgactattccaaaatgtcatatacttagagtcataacagtatatagcctttttagattggcgtctttcacttagcaataggcatttcagatttttccatgtgtttcatggcttgatacctcatgtcttttgagtgctaaataatattctgttgtctggatgtaccacagtttatttacctattgaaggacatcttggccacttccaagtttgggcaattatgaaggaagctgctataaattcatgcacattttgaactcatttgcttaaataagaaagagcataatttctggatcatatgcaaagaatatgtttagctttgtgagaaactgccagttttcttccaaaatggctgtaccattttgcattcccaccagcaaggaaggagaattcctgttgctccacaccctcactggcatttggtatcgtccgtgttttggatttttgccattctatctggtgtggagaggtcgctcattgttgtaatttgcaattccctagtgacatttgcatggagggtatcttttcatgtgcttatttgtcatttatgtacatttttaatacgtttcactttgggggtcatttagccttcacctggcaaaacaaacaaatgaaaatttacacataattctgtgaattaatttttaaaaacttcataaacctcacctttatccacttttattcttacttatatttacctagtcagacttttcagaactttttccaagttgtcagaacatatttaaaataataaaattaaaataggaggaatttttgcctgtcacctttgctcttctctcttttccctcatccactcccacaccttttcttctttagtttccttccccaaccattccaaacactcattatgcccaagcctctttggacacttcgatcaaaattttctcctctatatcatccggaggaaatgcaccgtttgctcagggacacttagctcacctgcttcccacgttttctctcggtctccacttgtgtctggactgagtgttgctgaccaccacagcatcaaagagcctgtgagaccactggatgcagtctgggggtcagtgacctcagaggaaataccttcagtgtcccacgggctctgcaggtcagtgcactcagagtgagcttcctcacactttgctggggaaagtgtccagtagcttcaataatctcatgaccaaaagactgaagagaggggagaagacatccgagttcacattttcaggcaatagtagctgacatttcctgaatgatccttgtgtgtcaggcaccttaggtccgttcatgacttaccacatgtttctgtatgacagcaccatggggaagcttctgtaattaattcctattggataggttgctgctgatggaagtggggtctccaaatcctctatcccagagtctgtgctgttctgcagactgaatatgctttctccccaccccttcctcaggctttggcaaaggagacctctgaaaaatggcacttagtatattattgacttttgttttttaattggcttttggactaatgaggtcagtataatgtgtgaaaccaaactagaaggcagtgctggtaagtttgttgagtctctgacaaatatttggattctgagcaattcaaacatccaggcaactttaaaaggtcttcttcctctgagactcatagtgacttatacaaataaaaataaaagattagtaataatagtagttcatcaaacactgcatttacttatattttctcaaatactattttcttttttttgaggcagagtcactctgttgcccaggctggattgcagtgatgcaatcttgactcactgcaacctctgcctcttgggttcaagcgattctcctgcctcaatctcctgagtagctgggattataggcatctgccaccaggcctggctaatttttgtatttttagtagagacagggtttcaccctgttgtccaggctggtcttgaactcctgtgatcacccacctcggcctcccaaagtgctcaagtgatcacccacctcggcctcccaaagtgctgggatttcaggtgtgagccaccatgcccagcttcgaatactattttctaccataccatttaaatgtcattcaaatttaatattttcaacaaattttgaaagaaggcaatcaggcaaatttcatctcagtcaaataatccctaaagttacacatgctgtggctgtacctttctcaactttgtttcccttcatccagttaagacttggttgtgcagagttaggggctccgcaggtgatgacatgatcaaaggccctgacccttgtcacaagagtactcactaagaataaaagtgtttgacatcctctcagcaactctgatgtgtaatcccaccagcaattagtgtttttctttctccgcgttgattacagatagtttgcttttccctgtatgactgcaaaggtgtgtatatttgaatgtatgtctgtatgttgtttgggttgcagggaaggaaggagtagaaaaaggaataagaggtggctgtgattggctggtcgctctgaatgcaaataactctatgcttttcacctttagtgaatatataaatgtctcaggataggagcgataataaataatgccaaagatcttccttagtggtcctgtggcttcattgaaggcatacattgaaatgtttctagccaggtgcagtggcttacacctgtaatcccagcactttgggaggccgaggcaggtggatcacaaggtcaggagttcaagaccagcctggccaagatggtgaaaccccaactctactaaaaatacaaaaaattagccgggcaaggtggcacgtgcctgtaattccagatactccagaggctgagacagagaattgcttaaacctggagaggcggaggttgcagtgagccgagatcgtgccactgcactccagcctgggtgacagagcgagactccgtctcaaaaaaaaaaaaagaaagaaagaaagaaagaaatgtttctgaacaggggaaaagccaaatgcaatgggcattcccgaaagactgaagaaagaatacgtgcaagttgattcttctggggtttccaggaaagttgggaaaagaaaatgaatcatttaaaaagtggagagctgatgcctggccctctgtacttgtttctctcagggaagaaaggcagcagaaagtagagcagtgtcccagtccacacgtgtccagggaagagaggcttctatttttaactgcagttacacaagactgttggcttttatgtttcagacgcagtgctgtgaaagaccatgtccttgtagttttcattatttcagaggtaaaatggaaagcaggagtaagagccccaatcattaagaacacggcttagctctctgcagatcacagactcagccaccaactcctgccctgtaaccatggagatgcccccacttcagtctgtacacaaccccacaagaggaaccacttactcgcttccttttctaatcagcatgaaataatatttttcataattattatctgaggcttttctatttcctcctctctatctactttgacaacataaaaatatattagggcctggtcgtggtggctcacacctgcaatcccatcactttaggaggctgaggtgggaggatcacttgagcccaggaggtcgaggctgcagtgagtcatgatcatgccaatgcactcagcctgggcaacagagtgagaccctgtctcaaaaatatatatatatacacatatgtattaggcattatgctgtacacaaagagcttattatctaatacacatgataatatctgtcactagatgtaagctttatagagataccaatttttttatccaataaccactaaccaaacaatgatcaaataaataaatggcaggttatatgtataccgatgtgtaaaggcaaatttatggccaatggttaaaatttactgaaaacaaatttcagctcgctataaaaaagaactagcaatcagagttttcccaaaaagaaacagacagctttaaggcataaaatattcctttctacaggaaatattcaaagaaaagtagaatgcccatttccagtgatgttgcagaattacaaaatgatatgattttgtgcaaaactaaaacatgtaagttttgtatgggggaaaatagcatcgaagaacagaacaaccaaacagcttgtaaaatgcatcgtgaataaaaaaagctacttccagcttaatggaaattggattttggatttgtatttgaagcatgtgtaggatttaaaatgagagagatggtaagagaatacatgccaggcaggataatcttatcaagggcaatgatcaagaaataacagagagaaaggtttaggaaattagaagtttccaaatatgactgaaagaaccaatttttattggaaaatgctgtgagataagagggaatcttggcttgagacaattgttagtgtaagaggactgcacacagcccagaactgggtttctttccagacaaagagaaaatggtatgagattatccatccttaccataaacaacattaaggaatatcttgaaattgtttttcagaaagagctaatattaacctaaatttaaactgttaaataacatcaaagatttactttacaagcacatttctaaatgtactgaaaaactatatttccataataattgattcaatggacagataaatttccttttccctgagtagttctatcatcaactaatagcccttattgcaggaaacgaaaaatctaaacacttttccgaaagtgtcgcgattccccgatcactttccagcgtgaattttcttaggggtgaggatgggaacactaatagtttctctgcactcaggaacctcataaaggacaaactttcaaatcaaataatacagaccaaataaataaaacagagctacatcttgctttgctttacacttcgttctcttccttgtctgtctgcaaaaacctttgcatgattttcattgaaaataactcctgaattgatgcgagattttacttaccctgggacctacccaggcctggtttagatatgttcccatagtcttccctgctcttccgggtactgagttaccataaggataaaccaggcagacagttcttagacattagggctaatttctaatttacccccctgtgtctttcttttatcatcacaaacatgtttggtgtctaatttggtttactcttaggaaaggatggtttggagtacataaaacagaatggttcctcaggcagcaatatgctacagttttagagatcttgtagctctatttttctattaattgatgcaggttttgagaatcaacaagcacattaaaaatagacatcaacactatagtaaaattaaaacagttattctgtcttttgttgttgtttccacattattcagaaagagaaaagtactctttaaaattagaaatggagaacaacaaggaagagaaatctattttgttgaaaaacagcttttggtaatattattcagtgaaagatgaagtgacagacgtggaaacttctagtcaaagtttgcagcttttatttgcattgaatatctatccaagatgaatcatcctagaaaagcagccagtggacttggaataatctcgctcaccatggtttctgccaaggaaggatttctttggcgcagaatgttgggtatttatttggggtcttgaatgggtgaaagagacaaagaacaatttacgagaaagaaaggagaagaaggaatggatccatggacagaaaagatttgtcctcaagggtacatccaagatttgctttaatctgtcatataatggaaatttgaaacagttattagcacaggttcacagcttctcaaaactaaaaaccattgtggaaaagaggctaagcacaaagatgtaagcactaaatgagtataactgctttgcagacagtttcatgtcagtggacatgtgccatttttcttctttttttttttttttctgcccagtgcagctgccacatattattcaatgcacaactttacagggcatcattcacatcttagtaagacatggagaaagacaatgctgagataaagaaaagcagatttccgagagcatcatcagagcctacaaattcagctctgcctggagctgcaaaagtcaaaatattctttttggggatcaagccagcatgaattgagattctgtcatttacagccaatggattcataattctcatagccaaaagggagagggatacttttggttctctgctattttatgagctgaatttatggtccacagaagcattttctactcaaaataactagagttatgtaaagacaaataatcattggtctactctcattatgggaaataagagccataataaccctatgtgtgttttatgaatttcaaatgggaaaaattttgaaaactactaaaaattcataactctacattataaacataagaactcttactttttctatttttactttttaatttccacttttgttactatttttacttattttccttgtttacatttttgcacatgaggaaatcatattgtaagaataattttatgaaattttattctcatttttagaattaaaaatgccttggatttatagtttgaattggctactatttcacaccgtagatatacaatactttataattttcctgattggggatatttttattatttatttccaatttttattattttaaatagcattgtggtaaacatctttaaatatacattttattttatttatatatatatttttattatactttaagttctagggtacatgtgcacacgtgcaggtttgttacatatgtgtacatgtgccatgttgttgtgatgcacccattaactcatcatttacattaggtatatctcctaatgctatccctcccccctccccccaccccacaacaggccgtggtgtgtgaacttccccttcctgtgtccaagtgttctcattgttcaattcccacctatgagtgagaacatgcggtctttgggttttttgtccttgtgatagtttgctgagaatgatggtttccagcttcatccatgctacaaaggacatgaactcatcattttttatggctgcatagtattccatggtgtatatgtgccacattttcttaatccagtctatcattgacggacatttgggttggttccaagtctttgctattgtgaatagtgccacaataaacatacgtgtgcatgtgtctttatagcagcatgatttataatcctttgggtacctacccagtaataggatggctgggtcaaatggtgttgctagttctagatccctgaggagttgccacactgtcttccacaatggttgaactagtttacagtcccaccaacagtgtaaaagtgttcctatttctccacatcctctccagcatctattgtttcctgactttttaatgatcgccattctaactggtgtgagatggcatctcattgtggttttcatttgcatttctctgatggccagtgatgattagcatttaattttcatgtgtctgttggctgcatgaatgtcttcttttgagaagtgtctgttcatatccttcgcccactttttgatggggttctttgtttttttcttgtaaatttgtttgagttctttgtagattctggatattagccctttgtcagatgagtagattgcaaaaattttctccaattctgtaggttgcctgttcactctgatggtagtttcttttgctgtgcagaagctcttgagtttaattagatcccatttgtcaattttggcttttgttgtcattgcttttggtgttttagacatgaagtccttgctcatgcctatgtcctgaatagtattgcctaggttttcttctagggtttttatgattttaggtctaacatttaagtctttaatccatcttgaattaatttttgtataaggtgtaaggaagggatccagtttcagctttctacatatggctagccagttttcccagcaccatttattaaatagggaatcatttccccattgcttgtttttgtcaggtttgtcaaagatcagatggttgtagatgtgtggtattatttctgagggctctgttctgttcaattggtctatatctctgttttggtaccagtaccatgctgttttggttactgtagccttgtagtatagtttgaatacaggtagaatgatgcctccagctttgttcttttggtttaggattgacttggcaatgtgggctcttttttggttccatatgaactttaaagtagagttttccaattctgtgaagaaagtcattggtagcttgatggagatggcattaaatctataaattaccttgggcagtatggccattttcatgatattgattattcctatccatgagcatggaatgttcttccatttgtttgtatcctcttttatttccttgagcagtggtttgtagttctccttgcagaggtccttcacatcccttataagttggattcctaggtattttattctctttgaagcaattgtgaatgggagttcactcatgatttggttctctgtttgtctgttattggtgtataggaatgcttgtgatttttgcacattgattttgtatcctgagactttgctgaagttgcttatgagcttaaggagattttgggctgagacaatggggttttctagatatacaatcatgtcatctgcaaacagggacaatttgactttcccttttcctaattgaataccctttatttctttctcctgcctgattgtcctggccagaacttccaacactatgttgaataggaatggtgagagagggcatccctgtcttgtgccagttttcaaagggaatgcttccagtttttgcccattcagtatgatattggctgtgggtttgtcatagatagctcttattattttgagatatgtcccattgatacctaatttattgagagtttttagcatgaagggttgttgaattttgtcaaaggccttttcggcatctattgaggtagtcattggtttttgtctttggttctgtttatatgttggattatgtttaatgatttgcgtatattgaaccagccttgcatcccagggatgaagcccacttgatcatggtgcataagctttcggatgtgctgctggattcggtttgccagtattttattgaggatttttgcattgatgttcatcagggatattggactaagattctcttttttttgttgtgtctctgccaggctttggtatcaggatgatgctggcctcataaaatgagttagtgaggattccctctttttctatttattggaatagcttcagaaggaatggtacaagttcctccttgtacctctggtagaattcggctgtgaatcatctcgtcctggacttttttcggttggtaagctattaattattgcctcaatttcggagcctgttattggtctattcagggattcaacttcttcctggtttagtcttgggagggtgtatgtgtcgaggaatttaaccatttcttctagattttctagtttatttgcgtagaggtgtttataatattctctgatggtagtttgtatttctgtgggatcggtggtgagatcccctttatcattttttattgcgtctatttgattcttctctcttttcttctttattagtcttgctagtggtctatccattttgttgatcttttcaaaaaaccagctcctggattcgttcattttttgaagggttttttgtgtctctatctccttcagttctgctctgatcttagttacttcttgccttctgctagcttttgaatgtgttttcccttgcttctctagttcttttaattgtgatgtcagggtgtcaattttaaatctttcctgctttctcttgtgggcatttagtgctataaatttccctctacacactgctttaaatgtgtcccagagattctggtatgttgtgtctttgttctcgttggtttcaaagaacatctttatttctgccttcatttcattatgtacccagtagtcattcaggagcaggttgttcagtttccatgtagctgagcagtttggaatgagtttcttaatcctgagttctagtttgattgctctgtggcctaagagaaagtttgttataatttctgttcttttacatttgctgaggagtgctttacttccaactatgtggtcaattttggaataagtgcaatgtgttgctgagaagaatgtatattctgttgatttggggtggagagttctgtagatatcaattaggtctgcttggtgcagagctgaattcagttcctggatatcattgttaactttctgtctcattgatctgtctattgttgacagtggggtgttaaagtctcccattattattgtgtgggagtctaagtctctttgtaggtctctaaggacttgctttatgaatctgggtgctcctgtattgggtgcatatatatttaggataggagaattgatccctttaccattatgtaatggccatctttgtctcttttgatctttgttggtttaaagtctgttttatcggagactaggattgcaacccctgcctttttttgttttccatttacttggtagatcttcctccatccctttattttgagcctatgtgtgtctctgcacgtgacatgggtttcctgaatacagcatactgatgggtcttgtctctttgtccaatttggcagtctatgtcttttaattggagcatttagcccatttacatttaaggttaatattgttatgtgtgaatttgatcctgtcattatgatgttagctggttattttgctcgttagttgatgcagtttcttcctagcatcaatggtctttacaatttggcatgtttttgccacggctggtgctggttgttcctttccctgtttagtgcttccttcaggagctcttttagggcaggcctggtggtgacaaaatctttcagcatttgcttgtctgtaaaggattttatttctccttcacttatgaagcttagtttggctgaatatgaaattctgggttgaaaattcttttctttaagaatgttgaatattggcccctactctcttctggcttgtagagtttctgccgagagatccactgttagtctgatgggcttccctctgtgggtaacccgacctttttctctggctgcccttaacattttttccttcatttcaactttggtgaatctgacagttatgtgtcttgtccactccagaccctgtttgcctgggtatcagcagcagaggctgcagaacagtgaatattgctgaacagcaaatgttgctgcctgatcattcctctggaagtttcatctcagagggatacctggccgtgtgaggtgtcagtctgcccctactggggtttgcctcccagttaggctacttggggtcagggacccacttgaggaggcagtctgtccattctcagatctcaaactctgtgctgggagaaccactattctcttcaaagctgtcagacagggacatttaagtctgcagaggtttctgctgccttttgttcagctaggccctgcctcccaaggtggagtctacagaggcaggcaggcctccttgaccttcggtgggctccacccagttcgagcttcccggctactttgtttacctactcaagcctcagcaatggtgggtgcccttcccccagcctcgctgccgccttgcagttccatctcagactgctgtgctggcaatgagcgaggctccgtgggtgtgggtccctccaagccaggcacaggatataacctcctggtatgccctttgctaagaccattggaaaagtgcagtattagggtggaagtgtcccgattttccaggtgccatctgacacagctttgcttggctaggaaagggaatttgctgacctcttgcacttcccggatgaggcgatgcctcgccctgcttcacctcatgctcagtgcgctgcacctactgtcctgcacccactgtccaacaagccccagtgagatgaacccagtacctcagctggaaatgcagaaatcacccatcttccgcgtcgctcatgctgggatctgtagactggagctgttcctatttggccatcttggatccacccctaaatatacattttaatttaactttttatcgtttcattaagacagcatcctcgaactggaattagtggttcaatgggcaaaacagctttatagcctgttggttccttgtctgtcttaatagcataacaccttttaaaagctttctaaattccttatctctactccctaacccctttcttactcaaaacccagtccaggcagatttttatccctatccttgtatcagaatcactttgttaaggtcacaatgggtttcatagcctcaaatccaatgatccattaccatgttttatcttactgaatttctcagaataatttgacaatttggttattctctccttgaaacattatctttgcttgagtttggggattccacactttcctggtttgctttcaacctcacaagccactccttttctagctcaccttcctcttgctgacctctagatactgtgttgtctcaggactcagtcctcaaacatatatgccgtctacatgcactctctaagtgatttcatccaggaatatggctttaattaccatccatacattgatgactcccaggtttatacctccatccaacccctctctgttgaaagccaggctcatatatactataatctatataacatctttgccagatgtctgtctggcatctaaaatctaagatatccacaacataccttattccctcccttacgctcatccctcactcttccccatctcaagaaaacagtgatataattcacccactcgctatagccaaaaatactggaatcttctttaattcttctctttcccccataccccacattgtcaacaaactggccacataagatgtgttttctgtcagaaaaaaaagcctgacttcattttttaattcaaataagaatgttacatgatgggttccaatgacaacccagtcatttcataattctaattctaaagtaggtagatgaatatggtaaggaaccttgcattgtggctgtcgccagttgaaatatattcctgttttgcaatatttcttgcttagcttttaagggctctcccgcagattccagaagctaataaattgtctctttatttggcagcttgggaattttttttttagcaccctggaccaatgcaccattccggatggttgagatatatactttttctttaaggggtaggaggtaagggtgatgttggaaagagaaatgggaaagaagcagcagcttaacatttggaccctgaagcatgttctagagcaggctggttttaagaaagtcctcatttgcctcaaggtacgtgaccccagtttaatgactataggcctaaatgggacaggatcacaatcacatttgtcaccagcagactcatatctaggaggcatacaagttattcctgttagaacagtgacttactggaaagtcatttcccaccactgatttgagtcgctgttattatcgtacatgaatttccatatacaattaggccatattacagatttgctattccatttaactaacctgtctgcctacccttaattttcacttaagaattttctttctctttcttttcacttctgtgcaatagaaaatatactcttttcttctacattttcttctgttttttttgttttggcataagaatgacaggaattttttaaatgtttaattgtagccaatcctttgctagtggtctttgtcctcttttaggttttctgatgtacagtcattttatctacttacatgcagatgatgttttatctcttcctttccaattcttatgcttcttattgtttctctgggctgactgcattagcaagtagcttcaacacaatcttagatagcagtagtggtaatgaacatctttttccttcacctactttaataggaaagcctctagcactttcccataagttggtgctggtttgggattacggtgtatgcaagttttatgtgatatgttaaagaattagttattagtttttatttttcaatgttttaacatgaatctgtgttgtattttgtcaaattccttttctgcatcaataaagataatcatatgattttttttcttggctcttgtatcagttattaagctactaactcttacctacaattgcttagctcctatacctcgcttctagagtagtaactgctgatgtcaatcatacactggcccctagagctagttgactttttaggtgtgtttttcttctctctccaactggataattagcatattctattttgtacattttattaaatgtctccacagggttaagtgaatttgttgaggtagtgacactcaacatttattgtttacctgccacaacccctgtccatcattgctcagtaaaatcgttaatcatctatagctagacatatacctgctagtacctacctagaatgttgaaatcacatacctgagataagagagaagaaaaattccaaggagaactctcatgtaaatgctacttcctccaagcatctaaaacagctcctctattctttctaggaaaaaaaatcccttctttgaggacattcctggtaagtatcctcataaatagaaaaaaaattttacaaagagaactaaagttttgctagcatttctgtggtttcagacttaatgtgatgtggggatgctctgattgggaaaaagaaagatcataaggtttctagggaagtgtaccagtttacaaatagccagattctccagtgaccacctcatgtgtctattgtttttttctcaagcagaaatgtgaaaacaggagaaggtagagtccagtcttacccaaaccctgcatgtccaggagaaagctaactctagtctaagctacaaaaaacgaaaaaaaaaaaaattctccttgttttacataatttcatacacaaaaaagaatggaagagtaatatccacaattaacatcaaagatcctcttattcttcatagactcagtgtagaggctcagacacttatgtcatgaccacagaaagaaatgaaggaagaaaagaatgaggatagatttgctagggccagggctttacccaagaaatatagctgagaaaatgtgggagggtaataggtaggcacctatgctccacaggatgagacctggatgcaaagaacagatgagagctttcttccctatcctctcctcatcttgagtccctagtcattgctgcaagtacaggaaaccataaaacagagtttcagaaaactaatatgtaaaacatgagaaattaccagtgtgcacaggtgcccagagctaaatataaagcacttggatatttgcaaaagcactagcatgctcagagttagccagttactagactgctttctcacacctgaaaacatcctaaaagaaaggatactacattttcctcctttgtctttttaacgagaatttggaaaaggtctaactcttttaacttatttaaagctgctgagattgagacatataatacagctctggtagaaaaataatcaattaagggaaataatcagatcttctctcaacctattcctacccccctcagaatgtactacagtgccatagaggcaaaaagcctgcataattctttaaaggtgaggggagtgagggagtttcaggtgtaaaggattttcagacagtcataactggagaaactttccttttaacactgtttgctttctttcttttttgtttgctcctcacctctctgtatgttccgtctacctttcatttcaacataacgagttactttatattaagggggaaatgaaaaaacaatttttttgagttcagaccacctgggggcagtgcttcctttgacagaggcactgccagaaactagaacaaggggaagggaacagcaggaggagggcattcaatgatgtgtgtgatgtaacagtgaggttttgattatccgtaaaaacaatgaagattccccaaaggctacccaaccaacagaaccagaagactctagaacagtgaactaggcccagtgaacacggccaaatctaggtctccaaactgaatccacagaggctccaggaaaaggaaagaatggaaactccactgagcactctgctgctgctcctctgtgtgcagctgacctgtgagtcaggcgagtcatgaggaggggaggaatcaagtaggggcggccagggcattgaaatttagaaagatcccggggacaatcttgggtctagtctcaggaatgtaaaacaaataatgaaactgatgaacaaacacactatatatatgaaaatgtttcattcctcctaagcagggtcaaatggacaactgccagtggaacagaatgctccttccctgaaagtcaaggaaggtgacagcgtcacactgaactgcagttacagagacagcccttcagatttcttcagtggttcaggcaggatcctgaggaaggcctcatttccctgatacaaatgctatcaactgtgagagagaagatcagtggaagattcacagccaggcttaaaaaaggagaccagcacatttccctgcacatacaggattcccagctccatgactcaaccacattcttctgcgcagcaagcacacagtgcccacagtcacctgcacccggtacctaaagcttgctgaggggcctgggcacacctccttttataagggccctggggcactgactataactctgctgcatacaaagggaaatatgagggactgttttataacataatatcaaacatttcatttgaagaccatgtgaggaaggatagtgttttcaaataccatctaaagtactttgtttctcagtgtgaggcccttcctttgtgaaaactagcccaaaaactagaggctaaatatcaaaaaggagagagcactaaagaacaaagaaagaacagggtaaaattcttgtctttgagcttctttgtagacttttacaaagatatagaaaatacaaaatcttgaaagccatgaccatcaaattcagtagtgaaaggaaaaatattttgacatgccaaaaagattggcttagaagatcaagtaccaaaatctgagggaaaattgtacaaagcatttaaaggaaaagagaacacaacatggtagaaaagctgtcttctccttaaaagggataaaatgccaaccagctagctagaaaggaagtcaatgatgtgaggagaggtcataaacagtgagtccagcatcctgctcttttctagggtcagagctctgagcaggtagggtgggaggagggtgagtcacatttagcaatgactctgaactgaaggaacagtgaattttggaaaaaactgttttgatcattgtgtcttatatcaatactcacaagaaaacgcccattacagaggaagcattcaacaaccatgtggacaagacggtcggtccaaagcatgtcagccagccagagaatgtctgtgcttgtcaatttcttgaacaatagacccatgaatagattagctgaggtgacagattgagtttctttataagcccagaagcatgggttttctcccaccaagacagattcagctacttctgctgctgtcacaggacttttccttagttcaaagacagggttcttttcccatgggcacgaaaattcaggctcgcaaacaatttgaatggtgagtaagacacggttttattgggtgaagaggaagaaaagggggaaacagggactcttacaaggccagagtccctgctagagcacttcccaccccgcagttcgaatcccaggttccacacaggaagaggaggagcctggctcctccccactgcaaaggatgccaacttctgcggctccaccccagtgcacaggctgcttggaatttctctagggaccccctcccacctggctgtctcactaccaaatgtccaccctgtcagcagtaaatacaacactgagccttcgatgtggaatcatccttcaaaggaaccagccacacactagttggcaagttgattacattggaccacttccaacctggaggtattaggaattttttttcttcttaatacatattctgggtgtgaatctgtggtctcctccaaagtgccacacatagttgcatgaactgatggctcagagtgtctcattgatcattctgatcatcaaaggatttcacatcccttgcatcaacagacccactttatatcaagggcgtgtgacagtagtcatgtcatatagcatatagcttcatcatacagcattagccatgaaccactagcctgatagaactttggaatgaccacttaagggcccagctaaagcaccagcttagggacagcaccctgaggggctgaaaagctattctttgagatagtgttgtgtccctgttacataaaatacatggacctgggtagcaagggatggaagtaggactatcaccccatcaaccaccactttcagtaacccacttttgtgcttcctgttcttataactataggttctgctggactagggattctgtttccctttgagggggaaaagggaggatgctgcttctacgagggaaataggtttttaccaaacccaagataatatatactacctcataatttggggatcttcatgccagtcctggaggccaagaaaggagttactactgtcatggacaagttgatcctgattatcatgaagctaaaccccatagcggaactggggatatatgtctacaactcagggaattcactgtgatgacttttagcactttcatgtcagtgattatcgtaaataggcaactgtagcaactacagcctgacaagagcagactaaccaggggcttatacccctcggtgatgaaggtctaggttacctccctggaaaagaaatctagagcagtagaaaaaaatgctagccgaaggtggggagaatcaagaataagtagtatagaaggtagatggaggagataataaatatgagttgcagtcatgcaactaactataacaaacgtaacttgtcccagtaaccctcttgttgtcaaaacaacatcaacaacaaaaactagtgatctatatgaatttaacacacagcacaagtggatctgagcaaggcaaggagtgaactgtatagatactgttggttccctacctatatctcctaggcagtcacgccaacatgctggacaccactcgctgaaaatcccagcaaccctgaagatgactttgactttctggccatgaatgtggaggctgtggaggacaagccagaaatgcaaaagagttaatgccccaaaagcagttcttaatcagtgatagacagggagtttaggcatgattactccagtttcttcatgactcatttggcatagctccaaagagtatgctatgctgtctcttagagttattgtgacaggtagttagacaggcatgaatggggcacaagagagctctcccctccacccaccaggagtcatcaggcgattgttcggcagttatcacattacctctctaaaaatgataattggcagcaaattatcactggcaacttccccaacagataaagacacttaagattggtaatcagcttccaataaaatctcaggaattggtgagtgaacccagcatgtacattaagagacaaaacagcagagtatgaccttctgtgggcactccaccagaaaaaggaagaaagcctcagatgtgcatgagtacaacttcctaaacacactgctcatgcccacgtcccaagcaggaaggagggcactgcacatgcgggcagcccatcctaagggaagaatcatgggaaaggggcacaagatgctggaggtaggtcagtgtataaaatcttaggattaaggttaaaggctgcacttgtccttccagttgtccgcttgggtctcttccaagtgtactttcctttctctcctgctctaaagctttttaataaaattccactcctgttctgaaatttgccttggtctttcattctgccttatttccctcagtcaaattctttctgctaaagagacaagaattgaggttgctgcagacccatatggattcaccaccagtaactcagaaccttctacctctaacattatccagctgcagaaagctgcaattgcccatcgtggtaactgccttgatggcacattctgtattggcttccttccttccctgatttacctcttacccatgttttgccaacaaaaaagagttaaactctgtaaaatagttaaagaggttgattctgagccaaatatgagtgaccatggcccatgacacagccctcaggaggttccgagaacatgtgcccaaggtggtcgcagtgcagcttggcttatacattttagggaggcatgggacttcaatcaaatacatttaaaaaatacattggtttgatccaggaaggtgggacaactcaaagcaaggggcaagggggtcagtgggagtgaggagcttccagcttataagtagatttaatatttttctggttgacaattggttgagtttatctaaagacctggaattaataggaaacgtctgtattgcgataagaggttataaagaccagagtttgatcaggcagatgaagcttccaagtagcaggtttcagagagaatggattgtaaatgcttcttatcagacttcaggtctgtgttgatgttaatgccagagaggtatgatgaagcatgtctgacccccacttcccattctggcctgaaccaatctctcaagttgaattttaagagagccctggccaagaaggaagtccactcagatggttgcggggggctggggggccttagaattttatttttgatctacagtttcctagaatcacctataataaactatttacacacaaattattgtgtcgaagctgacttttagggatccaaaaccaagatacaggaattcaaatcatgagacaagggtgaagattatccagaagaaatgttggtgccccttctcttattgctaccaagctgagctttgcagcacaagggattttagcagtctcattcaggatgggccccagtgcttacaaactccttaagcatctctctgagaggggacactcagccacctacctctgtgacagagaactcatgctcctcacacagcacccagtacataacagggcccccattcataatgcccagtttggggaccccaactcaggaattacataaggatccctgatgctccctctggaaatgcaaaattctaaagaatcagagtaaggtatttaaaaagagtttttttcacaatattttttcaaaatggaatgaaaatgataagagcaattcttgatataaatataaattaagctgaggcaatttagtgctgatgagaacttctgcaatagttatttcagagcttcttgatatagcataaacaaggtggttttgtttatttgtttgtttgcgtttgttttttgagatggagtttcactcttgtcgcccaggctggagtgtggtggcacaaactcagctcactgcaacctttgcctctcaggttcaagcgattctctgacctcagcctcctaagtagctgggattacaggcatgtactaccatgcccagctaatttttgtatttttaatagagatggagtttaaccatgttgcccgggatggtctcgaactcctgacctcaagtgatctgcccacctcggcctcccaaagtgctgggattacaggtgtgagccaccatgcctggccaacaagattatttttttaatccatgtaaaatgtgaacacaattacacactacatattctgcttttacttatctctgaatttagtcgatgctcttttcagccacaagcatatatcttttttctcattctttattttgagaaattataaaaatgtaaaaaaattgaatataaataggcatattcttatcactcaaaattaagtgtccttatttcataagatttgctttgtaattttttttaataagaagaaaaataaaatcacagtttgccatttgttgtgaatggagtcagaggcttctgctcaccattctggatcacgctctcctctccaagattaggtcgtattaaaaacaaatttgccagctccattttctctttatttttcttctaggctaactaaaagcactccagaaacattttttattttcatttgaaattataaccagaggcctattttctgagagaccaaaaagtattcagaaatgtttccctccttgaaacctagtcacccacccacctatcatagcatttcctgccctgaaggagaattctcaccaagcacagaggagaacccatcagagcaggagacttttcactctgcaggggagcgctgtcagcatgacacgagttagcttgctgtgggcagtcgtggtctccacctgtcttggtaaggaagatgtggttctttctttataaaggcatctaatggggctgtgaagcaggagggattaacagaacagcaactgcattgcctcttagagcccagctacctggaggcagaaatatgctgcctgaggctagaatcacaaagaaaggtgtgtgggaatggggaatgggaatcagcttgtgagtctgtttctcactcacacgtgatatcccagtgaagtcctttctctcctattttccacagaatccggcatggcccagacagtcactcagtctcaaccagagatgtctgtgcaggaggcagagactgtgaccctgagttgcacatatgacaccagtgagaataattattatttgttctggtacaagcagcctcccagcaggcagatgattctcgttattcgccaagaagcttataagcaacagaatgcaacggagaatcgtttctctgtgaacttccagaaagcagccaaatccttcagtctcaagatctcagactcacagctgggggacactgcgatgtatttctgtgctttcatgaagcacacaatgagatgagcagcagggagaggcttacagaaacctcagacctcagcatctgtgcaaaggtcacagggtgagagggaagtggtagggtaataggtatagaaaatcattgacttctcttggaaatgaaagcttctcctatttcttctcctgtaagaaactcagagagatggctgtctgcaagcttcaatccttaaagttacataaagataatgacgtgtgcagtgcattccagttttacaaggtgccttcactaaggtacttattacaggtcagatttcctaagcattttctctgtccagaaaatttttataatttgcctgggcattcttacctccaggaattttaaaccttttccatttgttaattgttgcttgtccttttatttgtccatctggtccaaaactgcatctcctccgaataaggtacccattttagaacacaacaggtgtgacaacggtggcataaccacgaaggggacttgctgggcccaccagactcaagagatgacctaggtccactgcagtagaacctagaagaatgatgaaaaggctttaaaatgctccgctgaagggccagctcgtgggcaacacctcagtggttggaatgctatgcttcagaaaatgataatattcgttaaaccactggctgattcatggtgtcgtggcaaaagtttagaaaccaagaaatagacatagaatagagtcttctcctatcactccctataagtcattttcagaattcgtgtttccctttcccacaaccctaggttctgctagattagaggtcctagttcccaaagaaggatgctcccttcggggattcagtaacctgcagctatggctgccacttttaggtcactctgaactctctgtgccaatagcccagcaggcaaagagaggagctattagaccagaaggggtcattgaccctgactgtcatggagcaccaggttgttgtgacacaaggagggtgaggaggaatgtggctataatgtaagtatttcacattggtgtctcctgatgtttccgtgcccaatacaaacagcaagcggcagttcttgtagcagcaaggcctgaaaagggcaacgtgaccaagaactgagactcttcagcaatgaagttttcaagaacagaagctcatgtcatgcaaccttcctgtattaagggcgttgaagagattgcagtcagaggcaaccttgaagacacagtgacacagtggaaataatatagggcaagcatgcatctgagtagtgcaaagaaaggactgtaactgatatatgcgccctgttgccccatccgaatgtctgtctgattttagctggagttatagtagacaatcacactcacgtcatgctggtaacatccagcgttaagcacactctgtgttttgttatgttatgttttgttttgttttgttgctttctatcccaaagtcttctctaatgtctcaggagatcccttagtttaagggcaagcacagcctgaaattatagggaaactaccacccctgttggcaaacaccaaccaatggggaaaaagagccagggaataaacgcactagctttgcgtcccttaaatagacaattctgagcggcaacctgtgtgcttcttgggagatcctaccagaaccgagtcccacttgagtcagttattgctcgacccactttcttcttttataacttatttttatagatcaagggagtacaagtgccacttttgatacatggatatattgtgtagtggtgaagtatgggttttcagtgtaaccatcacctgaatagtgtacattgtactcattaggtacttttcattcctcattctcctcccacactcccaccttttcaagtctcaatgtctgttatctttgtccatgtctatgcattatttagctcccatttataagtaagaaatgtagtatttgaatttctgtttctgagttacttcacttaagataatggcctccagttccatccatgttgctataaaagacatgagtttattctttttatggctgagtagtattccatggtgtgtgtgtgtgactggatttgcccctatatttccagacatctgttatcacttaacccattacaagcccgctgccgcagatattcccgtggcgagcgataacccagcgcactatgcggatgccattcgttataatgctcgaacgcctctgcaaggttctttgctgccgttaacccgtctggtttgggcatgatactgatgtagtcacgctttatcgttttcacgaagctctctgctattccgttactctccggactccgcaccgccgtgttcttcggttcaagtcccaacatccgggcgaactggcgtgtttcattagcccggtagcatgaaccattatccgtcagccactccactggagacgacggaagatcgttgccgaagcggcgttccaccgctcccagcatgacgtcctgtactgtttcactgttgaagccgccggtagtgaccgcccagtgcagtgcctcacgatcacagcagtccagcgcgaacgtgacacgcagtctctctccgttatcacagcagaactcgaacccgtcagagcaccatcgctgattgctttctttcacggccactctgcctgtatgtgcccgtttcgatggcggtacagcaggttttcgctcaagcaacagcgcattctggcgcatgatccggtaaacacgtttggcattgatcgcaggcataccatcaagttctgcctgtctgcgaagcagcgcccatacccgacgataaccatacgttggcagctctccgataacatggtgtatacggagaagcacatccgtatcatcagtgtgacgactgcggcggccatccatccagtcatcggttcgtctgagaatgacgtgcaactgcgcacgcgacacccggagacaacggctgactaagcttactccccatccccgggcaataagggcgcgtgcgctatccacttttttgcccgtccatattcaacggcttctttgaggagttcattttccatcgttttcttgccgagcaggcgctggagttctttaatctgcttcatggcggcagcaagttcagaggcaggaacaacctgttctccggcggcgacagcagtaagacttccttcctggtattgcttacgccagagaaataactggctggctgctacaccatgttgccgggcaacgagggagaccgtcatccccggttcaaagctctgctgaacaattgcgatcttttcctgtgtggtacgccgtctgcgtttctccggccctaagacatcaatcatctgttctccaatgactagtctaaaaactagtattaagactatcacttatttaagtgatattggttgtctggagattcagggggccagtctagtgacattttctttatttaatcatccatccattgatggacacttaggttgattccatatcttttctattgtgaatagtgctgtgataaacataacagtgaagttatatttttgatataataatttctttttgtgggggtagatacccagtagtgagatgctgggttgaagagtagttctatttttagttctttgagaaatccctatactgttttccacacaggttgtactgatttacattcccaccaacagtgtatatgtgttaccaaacatctgttgttttctgacttcttattaatagccattctaactgatgtgagatggtatctcattgtgcttttaatttgcatttatctgatgattagtcgtgttgagcattttctcatgtttgctgaccatttgtacgtcttctttgagaaatgtctgttcatgtcctttgcacacttttcaatgggcttatttgtttcttgcttgttgagttgtgtgagttccttgtagattctggatattagtcctttgttggatgcatggtttgcaaatgttttctctcattctgtaggttgtctctttactctcttgattatatattgtgtggtacagaagctatttagtttaattaagtcccattagtctattttttgtttcgttgcatttgttttaagatctcagtcataaattctttgcctaagccaagatccagaagagtttttcccaggttttcttacagaatttttatagtttcaggttttatatttaagtctttaatccatcttgactttatagtaagagaaatggatccagtttcattcttctgtgtatggctaactaattttcccagcactatttattgaatagggtgtcctttccccagtgtatgtctttgtctactttgtcaaagatcagttagttgtaggtatgtggctttatttctgggttccatattctgttccattgatctgtgtgtctatttttcatacaagtaccatgctatattgatactatagccttgtagtatcatttgaagtcaggtgatatgatgcatcaagatttttctctttgcttaggattgctttggcattcaggctgtttttttgtttcatattgattttagcattttttcctaattctgtgaaaagtaatattggtattttgataggcattgcattgaatctacatattgctttgggcaatatggtcattttaataatattgctttttccagtttataagcatgagaggttttttcatttatttgggttatccacaatttctttcatcagtgttttgtagttttcctagtagagatcgtttacctttttgtttaagtgtatttctaggtattattttgtggctattataaatgggattatttattttgtggctattataaatttagtttgtagcttggttgttactgatgtatagaaatattactgatttcatacattgattttgtatcttgaaactttactgaattcacttatcaaatctgggagtcttttggaggagccttgagggttttccaggtataagacatatcatcagcaaacagatagttggactttttcttttccagtttggatgccttttatttctttctcttaccaattgctctggctaggacttctagcactattttgaataaaagtggtgagagtgggtatcctgctttacccattttctcactcctgcttcctgagatcacttcctaaataaactacctgcacccaaggtagtttcaggctctgtcttggggggaaatcaaactaatacagggaatctttggaaatccaaagattctttgaaaatttaacaaagaaagaacagaggagagttcaaggtgaaccttactgggctaagctaataaaggtaagtgtgtacttgagtgagaaattgtaaaaaaaagatgatgaggcagatcgcatttactaaactccaatctctgcagatatgtgattacgtcttttcagtgttcaaaaactttactttccaagtttaagctctttcaactgtctctcatttccccttcccaaatcttctgaccctttactatttaaacttcattcctagttattcccaaaatacgtctctcttctagtcagtttattccccttactggctcataaggacttaaagctcattgctggctctagcatttctctactggttgctccacccacccaaatttcccttttgtgtatatttcagactgcttaaaccatattaatcttataatgaccaccagaaatctctcttccctctaagatttcttctctaataatcaaacaatcctttaattccttctcttccaaatgtcatacagtaccaactgtggaccaaacaatccgactcttactgacataccttcctaagacatttgctgttgtttcaaggtactcatctttcctccccaaatacattatattctctatgtagatagagtttgccttgtacccttcacaattcctcactgctcttagcacagtactaagcacataataagtgctgataaggcacaaatatgcttaaggtttaaattataatcatgctatatttctgaaagaatatgaaggaaaagaaacaggtttctctgaggaggtaagatgtgatagaaggtagaatttaagaaagcagtgataaaggaaaggacagatacatttcaaacatccaagtcttttgatttagtggaaacataaatctgaaactggtaaaaagattacttttagaatacatttcttactaaaccaagttctttccatacagaaaatcctagaaactgcctctgtaattatctctttgatctgaagagggcactgtttgctcctgttgatagcagttacttacaaaaaaccgatctcattttgaagaatccgctattcctaatacatacaaaataactagaacaaatcctatgttatccgtagagtctaggtcagatttccacattctggaatcaagttttccaccaattaaaaaggtcaaaccatggaggagcttttaggaactgtatttgtgatctggtggctttggcctgggtgagagctgagtgaattcatttcatcagggacacagaggactcagaaggttctgagaactagtctctatattttacagaagggattcaaagaataaataaaacatttaatttaccctttatttaatttacccttaattcatcttttttaagaaaatttgctatcaaatgaaggaagaggaatgctcttctgaccatctgtccagagagacacaaccaatctctgttctccagagagacagagccaataggatgaatatatagatatatgagaggggatttattagaagaattggctcatgcaattatggaggctgaggagtcccatgacagactgtctgcaagctggagaacctgggatgctggtagtagtgtgactagtccaaatccaaaagcctgagaacccagggggccactggcataaatcctacagtccataggccagagatcccagagttcttgtgtctaagggcaagagaaaaagagtgtatcccagctccaggcaagagaaagaccaagttgcttttcctaggtttctgttctatccaggcctctagcagattggatgcccacactgaagatggatcttccccatgtattccactaagactcacaagccaatgtcctctagaaacaccctcataaacacacccaaaaataatgctttaccagttctctaggtattccttaattccgtcaagttgacgcctaaaattaactatcacaccatccatgaaggaaagatgttttgtcatctactataattatttgaacaatgtttcagatccatgggacagaatgaaaaagatctagaataaatctgatgtctttgtttctgttcttgttaactagggttttgtagtgcaggggaagataagcagcctccttcagtgctagtaccagctccctctccctgaaccacaagaccacccagtcgagggacttagccatctatgtctgtgctgcagggaacctacatgcccctgaaagcacctaaatgcaccaccccctccaccctgcattgggacctccactcaggggttagtaaaccatcttcatcacctcctctgaccaaaagaatattgtaaatgaatgtaacaaatcagagaaaatcttttctaaaagacttttagaaagctttttgttcactgtattatcagataaggaattcagagtcatgagaaccctgatcatgagctgtctgaggtgattaggaccagggaccctgagtgttctttcgtcaagacccactcatctaagaggggctgtctcaatgattggagcggcttctcccacttgtgccattaattgctggtatgcctcagtttttgcatctgtaaaaattctcccacgagaacctgagagtaggcgtgtgatactcacatatttttctcctagtttttactttttatagtctaactagctaactccagtaagaaatcccatgatggtagttgccagatagggttgatatcccaagggagcacagtaaaatttctcagactgcccagaaggggttctgcttccacaaaaaagcagccgtctgcccaccccacccgtatttgcccacttgcaagttcttttatatacatcgctttatttggtcttcaatgttcaataatttgattaactgtggaagttggaactgattgaatgataaatacaagatactaaagttctgattgcataggtcccagaggatcacaaaaaagatctaaagtggcaagatctatctatggccacaccaccccaaatgtgcccaatctcatctaaaatggcaagatccattcagcattgcagcactggaatccccagtcagcattgcagttgcaggcccagtgagcccaggcaagaggcggaaaacatttactcttgagaccctaattagtgaactcatagatagctgcagctggcctgagactgggagagaagacagcccaatcgtctggagcttcctatacagactagagagtggtggcacatgcctgtagtcccagctactcggaaagctgtggtgggagcatcacttgagcccaggaggttgaggttgcataattgcgccactgcactccaacctgggtgacagagtgagaccctgtctcaaaagaaaaaaaaagagaggagaagggggtaaattgtaaaataatagcatatttgccaatttcctgtgaatttgtccagaaaatagtaggtagtgcagaaatttaacaccacgcaaacaagaaaagtagaccacctatggaagaaactcaacatgctgtactttaagaagtcctccggagttaagaacggctgtggcaaaatgcccactgttagcaccatttccaagtggaaataataaatgggaagggagagttaagaccaccactccctatacggcaagtcagcttttaatttagtcttttattctccttcttgttttacagggggaaaagtttacataaagctgaactatacagaagccttatctaagattggatgacacaaattaaatagggagagaaaattaatgcaaatgaaactagtagttctctgtattgtgagttttcatttttgctctgttgcctcttctataaaatgcagactaattcctgacctttcctccctcaaagaagaatgtgtgcatgaggaaaaaatcagatgccaatgaaaagctgtcagatgtgcaacacagaatgttcccaaatgaattttatgttgattgttctgagtcttctttcacaaagtcattaacagaagctcacaaaagcccttgccaccagtattgtagagctccttgacacagccaaaatcaggtattctttttttaaaaaagaaagtcttcagcaaattacagtataattagatatcaaaagtctggtttcaattttctctagactatctgaatgttattgttgttgtcattatttttcatcatttctcaaagtattaaaatacaatttggtcaaacaataatataaccaatacctgtattatcataacccagagataattttctgatattggcttcaagacagaggagggaaagaaaaaaaggaaagaaggaaggaagaaaaaaaaaaggaaaaaagaggagtaaggggaagggaaagagaaggaaagacgggaaggaaagagagagaaagagagagagaaaggaaagacaataaaagcttatagagaaaactgaagtcacagcattagcttggcctgtcttttccccacccatctcattctcctatccaaattatgtctttaaaaaacaatgtatcagctccctttcctcttcatgtttattcccaaataaattacagttccaacaacatcttttttcgttaaatattatggtccaagttttattctctgaagcaaaagacaaaaagtatcgaagagctttccctaagggagacatcataaacagcccacctgacatcccatttcctgttctgaagcagctacggcaccagtgcagctgatactcaaggttcagatcagaagaggaggcttctcaccctgcagcagggacctgtgagcatggcatgccctggcttcctgtgggcacttgtgatctccacctgtcttggtaaggaaggcgcatgtattcaccttaactagtattcaatagaacagagaagtgggaagaaagattaatagtgcaagaatctaatctcttcactgggcccagctattaggggcaagaaagctgatggattttgtcagaggtttggatcaagaggaagaaaggcgggtggcaatgggaacaggcttgtgagtctgtttctgtctctcacatggtatcccagtgaagtcctttctctcctctttcccacagaatttagcatggctcagacagtcactcagtctcaaccagagatgtctgtgcaggaggcagagaccgtgaccctgagctgcacatatgacaccagtgagagtgattattatttattctggtacaagcagcctcccagcaggcagatgattctcgttattcgccaagaagcttataagcaacagaatgcaacagagaatcgtttctctgtgaacttccagaaagcagccaaatccttcagtctcaagatctcagactcacagctgggggatgccgcgatgtatttctgtgcttataggagcgcacagtgagacaagcaacagggagaggcttacagaaacctcagacctcagcatctgtgcaaaggtcagggggaagtgttcagggttataggaacataaagaggaaataattgtcttccctaaagaaaaaaaaatgtatctgactataggaaacacagaggggatgtctataagctgtaatttttgaaatagtaataaaataatgaatccacacatgccttatagattttcaaagtaccttcacatgttaatccattaaacctgcataagcctgtgtgttacataggtcagatcagatattctaaggatcactgctatccagagaatcttagagcttgacctaaagctatattcttttagaattatatatttttgctttattattttaattactatctatctgtacatcccatgatcatatcaaagtcaatatatccaaaactgaatttcttaccatctccacaaacctttattttttcttcatttttttctcctcagccttgctcaagattcaggaacacaataaaagtttgctattgctgggtttccagtttggggaatttcttcaccctcgactttccagcctgggctatcagatttttatgcataccttattacattctaattataaaatggtgcaaaaaaaaacactacatcatgtcagtctcactgtttcccctctatccgtcattctttctgactttaacctggcttaatcctgtatttcttaacgttctttaaagcatcatttgtcttgacataagaaagtaaggaaagaaagcaaacgactgtcaagtaggatttcatgtactgctagtactcaccagcaaacgctaaaaaaaaaaaaaaaagaggaagttaacttctggtaatgctataattgcttctggtaaggcaacctagcaggtggtgacaattttgataaacctggtccaacagggagaccaagcagctgccatggtccaagtctccacccctatgtcttctgagaattgggagatgcctggaccgtgagaggattctcccttatgctaagggaaaaattaaaataaatgaaaaaaataatgccaacatttctttttatgcccacaattcccccaatacatctccttcactattaagccccttgtggagcattttattccatctgctcactgtgggtggcgagaggaagtttggaatgacaaacagccgaaataattaagtccaataagcaggctccagagcttaggctgggggtctgtttggaatgagtggtgagagtgactggatgtggaagagggtaaggggaggccaagaccaaactgcagaatcataattcagattgccgagtcatttcccaaacacagcagcttcagtaacgccacaccctagcccagcttagcacccaggcttctgcttgtctgaaaaagtggggtaggcaccaatcaaaatgaaaacctttctctcacacgaggaagacaccttcaggctattcaggttttgtcctcccttttacccctgaggcccatgagtcacccagacttagattcgggctagttaccaagtttcatatcaaagctcacttctttctatccttgcttctagtgctttcacgcagctcctctcatttgaattaataaataatcattaatctactctctctaccttcgattgtgtcctcttttaatatggtttagctgtgtccccactcatatctcaacttgaattgtatctcccagaattcccacatgttgtgggagggaaccagggggaggtaatggaaacatgggggctggtctttcccatgctattctcatgatagtgaattaagtctcacaagatctgataggtttattgtgggtttctgcttttgcttcttcctcatttttctcttgccgccgccatgtaagaaatgcctttcacctcccaccatgattctgaggcctccccagccatgtgtaactctaagtccaattaaacctctttttcttcccagtctcaggtatgtctttattggcagggtgaaaacagactaaaatacacccttcaaacattgcttcacatagctgtcccagtgagcatcctataataaaaatcagatcatgtacacacacctctgcctcaataaagcctcatttcccacagaaaggcccagtgattatttagaatataagtccatcaaagcggaggccaccactgtatctccagcacttaccatgcctaacagggtaaatggtcagggtcatctactgatggattaattagtctgtaccctgcttagcaactcagcctcatttgttgccatattcccatccccccaaactgtacacgcccatccgctcagcaaatgaaattgtttcctgcatctatgcctttgccagcattgtcccctcagcatggaatgcccatccccaattaaccacttgcctattatttgaaaggttcgcaaacctcccctcttctctgaatccttgtcctgacccttttgcactggtagaactgatcactttctcctttatctcctaactgaaaccctaagcatatttctaacgtggcaaatccaacaccttatggtgtttacaggtatttttcactgtctccccactaaaatgcaaactgttagttaccaaggacacagttttacccatttcaatagcaactgtgcctccaacaatctttaattcacagaaatgattcttaagttttttgaatgaaggtaattaattgatgggcattttcctcattaaacattatagagtaaaaatggataaattttctattttgttatctcctccatagttgtgttaactcagaattctgagctaactcataggactgtaaggcatgtcaaaaattaatagtaacaacagtatcatgctgataataaaaatattagtagtagctaacaattattgagtatatatatatatatatatatgcgccccatattctgagaggtgcatgacatgctttatttcatttagtagtcccaacaaatccatgctgtagctactattgatatcccagttttatatgaagaattaatataggttcaaagaggccaaaatgcctagaatcacacaatgtacgactccctgaccactggcctttttcccttcccaaagggtggcaaactgctatagcatctcagtcttattaatgtaatagacacatagaacataagaaagaaattcatgaaaacagtgctgcaccatacatgcacttgtagtcctcactttttctagagtagtaattgcaagatgagacttatttcaagtatccttattaatagaagttaaatgtaaaaataacactattaccattattgtttacataggaaatttttgcctttttaacattagtttataattatttgacctgggactatacaatattttaaacttcttcagtgcatttttcaatagcgtttaagtttaaaatgcagtctttggcaggggcattaataaatgtttcaaatgtcattttgtataactctttaaagaatacaagagtttagaagaaatttctaacctttccaagttatctgaatttccaagttatcataggaagatccttcctttgtaacttttaaaacttttttgtatatggttgggcgtttctatgaatgatgcttttcaattttttttgcttcagtgaaaaattatatattgtgaaagctttcccacataaacaagcagtttttctatagcatgagtttcccatggctacaagatattgtatttttgaaatacacctcattttacccaataacttgaggttttttttgttttttttttttgtttttttttttttcagatggagtctcactctgtcacccaggctggagcacagtggtgcaatctcagctcactgcaacctcccacagccaggttcaggtgattctccttcctcagcctcccaagtagcagggattacaggtgcgcaccaccatgcacagctaatttttgtatttttagtgggggtttcctcatgttggccaggctggtctcagactgctgacctcaagtgatccgcccacctcggcctcctaaagtgctgggtttgcaggcgtgagcctctgtgcccggcctaacttgagttattgatcgagtaaatcaatgaatacagtaagcatgataagtacattgtttccaaattggagctataataagtaaaactgtaattttaaaaagatacttgtacataaaatagtatgcaagtaagagagagcccagatcaaagtaaccgaagcaaaacaaaacaaaacaaaaatctgttggctaataaaactgaaaaatctgggttaactactttaggaaggactgaccaaatgctcaaataatgtcaccacagcgtgtctctatcgtttggctcttgtttatattggctttactctgaagaaagctcaggcccacatgatggcaaagatggccgccaggagcctcagacttgtgtcctactgtgttagtttcctcctgctgctgtaacaaattatcacaaacatggtggcttgaacaatattactttattatcctacagtttgggagctcataagtctcactgcactaacacaaaggtgttggcagggctgtgttccttctataggctctaggggagactgagtgaaatcctgagcatccctggcttctagaggctgctgcgtgccttggctcatggccctcttccatcttcaaaactagaaatcgcagcactgtgacctctaccaccattgtctcatctcctgtcaccctcatggccctcctgagccttgatccttgagattacattgagatcccccacatattccagaataatcttcccatcttaagattcttggtgaatcccattttctaaatcacattttcaaggacatttgccacataaagtaacatattcacaggttctgaggataggtggtggacattcctatagactgaatgtttgcgtcctctcaaaatttgtatgttgaagtcctaatccccaaggtcatggtattaagtggtaggacctctgaaaggtgattaggtcatgagggtggagttctcatgagtgagattagtgcttttataaaagaggccccagagagctgccttgctctttccaccgtgtgagagcacagcaagaaggtaccatctatgaaccaggaaatggccctcaccagacactgagtctgctgctatcttgatcttagatttcccagccttaattgtcagaaataaatgttggttgttaaagccacccagtctatggcatttggagtataactgccccagtggatgagagagacatctttggaaagctacttctctccttaccatacctgccaaattaacaactccagcagaagaaacaggcttcttttgtgatatttccagaaaatatcctggactgactttgcttagactgatttcttcagatttgggaaacaggcagaggtggttcctcaaggcaaagccaagatgctactagaagaggaatgaataaggatacgtaaaaataacagatgaccccaatgctattaatttatttcaaactcctttttgccatcagaaagcagtaataagctcacatatcaattccaataaaataattttttaaatcgcccaaacttacatttcaacatagcaagcaaaaagcaatgaataaaattgcttcaccaaaatatagaagctctgttgaccagaaattcagcatagacagttgttcaagataatttcaatgtgttcagcagataaagggacaaataaggactctttaagggcaaatttagctgagggatgtgttaaattgtatatttggcagactgaaactaaagaataaaaaaagagacagcttgatataactttctatgccaaacccaatgttatactctaaatctaaaactccagaaaaagtttgaaagcaacaaatatgaagtcaggaaaatcattctaaattaccaactatttaggtataatcttgagcattttagctgtagatgaaagtcctatttattcatatagattctcatatgctatgaataatagttcatttggatgtctctttaaatcaaggagggataaagacaggaaggaagaaagctggcaggcaataagagccaaagtaaagatattattttgattaaaatatactcattgttgaggtatccacaaatatttgagaacacattgaagaagtaagacaggtcagaaaatataagtatatgatcagcacttagtgaaaacagttaaagagaaagaaagagcaaaagaaaaattgcttaaagcaacatagatattcaaagataaggaattaaagctgagataaatgtgacagaaatggaaaggaaggaaaatgaagttatgaaacattggcaaaaatagctaaagaatgcagaataaaatgtcctagaaaacatttatcaaagggttatattttattagcattcagtagtcacaaggcaagaaatatgatagctataaataaatacatgagaatgtttaaggttttatgatgatcgtggctttactgttcaatatatattaaataaaccacaagttatctataacacagttctgaataaaatttaggaaacgtagagtcaggtacctcaatatagaaaaatacagaaataattaaccataatgcagacaaagtgacacccagttgtagagagcattacaagcattgaaatattcagaatattatttgattaaaaaaaagctcatgtaaagataccctaagcaataccaaagatacacacacacaaacacacacacacacacacacacacgacacatacatgctatatataggaaggaagaaagcttctttattggggacacagtttacatattacctcttgtttctatgagatgctataagaaaaaatctcttaagatttactacatgggtaatatatttatatagtgtctgtgtgtatgtatagcaaactcttatatatatatatggatatcttacagtcttatagacttatatgagagtgacagtaaaagagagagagagagaggagtgtatacctatttcctctcaaaaaggccatattctggcaactcccttattccccattccctactatgcagtttgatctagccttagatttcccaggaggttctcttccagaaaagtgcctgtagctataaaataatcttcatcttggctgtttcaatgcaggattcctattgagccaataccttaccattttctttccttcgtggaactgtgctttgtcataatgcaataagttttctatgaagtatatcataaacaacagtcctacagaattcatcattggacataatatagcttctttattggggacacagtttacatattacctcatgttctatgagatgctataagaaaaatttctcttaagatttcctacatggataatttgtacctacacttgtagtttgtttttatcatatggatgaggtaattatcacaggactgattgttttccttctttacattgactgctaataagttcagagccaatgttagcttaactccaactatagaggctgattgcatatattttaattccaaatctaattcaaggtttatgttcctgcccttatttttttcttcttgatttttgtatttctttgctgttgtttttgtagatttttctgtgccttatacttttttcaaagataattaaaacagtgtgtgaattcagtggggtggatgaatgaatgaggcagagaaaaaggaaattgacatggtaggataacaaactcacataatatgtagatacatataaaaagacacacaaagaaaaaaatttctctaatatatctaatcttctttatgaatgatcccatctaccaaatagtcaagaaacttaaattttgtaaattgcaattaacaatgtctcattttattcaggtttaaagagttcctttcactttaaatattcagttcatttaagttcaattccatgttagggctgatgtaaattctttcttagatgactcagtctctttaggtgatatgtttggaattcaaccaccttacccttttctttccgtgatgaaatttaggtgataaggtgagacagttgagtgtcacctgaggcaaaaaaaaaaaaaaaaaaaaaaataggcttaaatccatgcattgccttctggatcttttggtctgagcagctgagcagccaatctactctgttccctgtgtaggtacctagttatatatggattttcctacctggacttttgggattatgtgttgacaccactgctgaagccaattgtttcagccgcttgactccatctcaaagaccctcatcatgggcacttctttgtacttagcccaggactttgccaggccactagctctctcaattctctgcatctacttcctggacccctggggacttctgtattccctgcacctgtaaacagaccatggggattctagaaagtagcctctgactcatgtagccaagccttgatttttctccagcgccatcttcccacgacttaagtaagacttcccccagagacatgcagcctgcccctagaacactgtgagaggtgctctactacccagtactcttgtgctgttcccatacttatctaaatgcttctagcctttcctaacccaatcagtgtccgcccatagcagaccaggggaaagaccagagtcctgacacctaagttccttgttctgcctccatttttctttaccctctaggacccaaaaaactgacctccctctctgtcctgcacctttctgtcaaactgatgtaaaactctatgatcaagtccagctggtcttacatataatatggtaaagaatacaataaataattaagaaaaagtgttacacctgaaaaaaaccttacttttaaggcagttctcttgttaagtaatcaaagatccaaatttagatgtcagagctgaatattaatgctttctatttccattcctctcagaataatctaatctctccccactcaagacagatagattcctcagaagaatatagataaggttatgtatctgaaaatataaaggagaaaagaatattaatacatttcaaaaatataatctcaattacaagtagagggaggaaatattttatatcaccaagggcactcattggaaaatcaccatagatattttcaaagaaaataaaagacttccaaaatcaaaagaaattaagaaaatgaagaaaagacaagccacagactgggagaaaatatttgcaaaatgcatatgtattttttaagtggtatccaaaatgtgcaaagtactcttaaaactcaacaataagccaggcatggtggctcacgcctgtaatcctagcactttggtaggccaaggtaggcaaatcacctgagatcaggagtttgagaccagcctggccaacatggcgaaaccctgtctgtactaaaaatagaaaaattatccaggcatggtggcgggagcctgtaatcccagctacttgggaggctgaggcaggagaatcacttgaacctgggaggtggaggttgcagtgagccgagattgagccattgcactccagcctaggcaacagagcaagactccgtctcaaaaaataaataaataaaataaaataaaacaataagaacatttaaaacccaatgaaaaaaatgggcaaatatctgaacagacacctcagatctgaactatctgaactatctgaacagactataaacaaagtatatagatggtaaagaagcacatgaaaagatgcttaacatcaaatattactagggacttgcacattaaaacagtgaaatatcactacctgcctatcagaatgactaaaatccaaaacactgaaaccatcaaattttgtgagaatatggagcaacaggaacccttattcattgctggtaggaatgccactttggaagatagtttggcagttactcataaaactaaacattctcttaccatatgattcagcaatcatgctccttagttttaactcaagtgagttgaaaacttctgtccccataaaaatctgcatgaaaatgtttgaagtacctttatttataattgctaaatcttgaaatcaaccaagatgtccttcaacaggtgaatctatcgacaaagtatggtacatccatacaatgaaatattattcaatgataaaaagacatgaccaggccgggcgcagtggctcatgtctgtaatcccagcacttcaggaggccgaggcaggcagatcacctgcagtcaggagttcgagatcaccctgggcaatacggtgaaactctgtctctaccaaaaatacaaaattagctgggtgtggtggcacatgcctgtaatcctagctactcaggaggctgaggcaggagaatcgcttgaacgaggatgtggtgagccgagatcatgccattgcactccagcctgggcaacaagagtaaatctccatctcaccaaaaaaaaaaaaaaagacatgaccacaaaaagacgtggaggaactgtaactgtatattgctaagtgaaagaaaccaatctgaaaagactatatactgtatcattccaactatataacattctgaacaaaaacaaaactatggggagtgtacactgatcaaagtctaatgtaaattatgggctttagttaataacaatatattaatattggcttatcaattgtaacacaagtatgacattaatgtaagatgtcaataataggggaaatggggaggatgagggttgagggggtgtataagagctctgtatttccactcagtagtaatacatcccatgctagtcttaatcttaaaaagggaaatatattctagttgctgtatttcacaatgctatgatcattccttgtcttacttagttcattaaagctgccatatacaatcatagactaggtagcttacgaattacagaaatttattctcagagtctggaggctgggaagccccaggtgaagacaccaatggatttggtatctggtaaaggcccatttcctggctcataggtgacattttctcatcatgtcctcacatagcggaaggacaaggcagctctctggagcctcatttataaaggcaccaatctcattcatgagggctttgccctcatgacatagtcaccgcccaatggcaccacctcctaatatcatcactttggcaattaggtttcaacatatgaattccaagggggaagacaaacattaagattgcagcagtcctttcttctctatcaaatccttgcttatccatctagatcctcagcaaatacaacttagactatatagcccataatgatctactttgctaatcaactcacatacaacttcttgactctgccatatgggggactttttaaaacattgacttatatttctacttaatcgtgtacaggtttatatgtgtcaatattcagaactatgatttacacacatagaaacatataaattaaaccaccatcatcactcccaatcatacacacacatgttcatatacagcatccaataaagcatcctattcaaatttggtaataaataaatatttacttcttgaaagatcaactggctaaagaaaataatgtattccgattcatccactttcccaaaggagggttctacacaacaatcactagtgtgtgcctttggtcacacttttaagtaacagtaagcaatgaaaaaacaaatagaaaatgccaggctgctctcatttgcactcctgcttcatgtaaatgctttcaattattcatctagcaaaccacacacacattgcaaatgcctaaaatttccttttgccaattagaggtaaacgcagtccccaatttctatccatagaagaattaaagcaattctatttgcatccaatgtaaccaaaagttgcctttctcaaaagatacctatgtggcctcaataatccagacaaaaggctcactctctcagtgtggctgctgtacttcttgcctcttgtctgtataatctactgaaattaggtaccacagcactttctctccaacaaatccatggaaagtaggaaaacatgttgaactactccaggactcccaaattcaggttgaaattttctttcaacatagaagtagaaacttctggtgaaagatggtaatagctcagcaggaagtcagcacaaacctctaaaggcaaagcaggaggccggagtcctcccctctctccctccctcataaggagccctgctctggagacttccatggggacaagagagaagaaatcgttttgctgctcagatcctaggattgagtgacataggaatggagggcccaaaaatttgagtaaaattcctagacttggtttctgaaactatcctgactctaagattaagcaacttctcttcttaaatttcttcttataaatctctccttggggaacgttcctgggtggataaaacctatggaagaggggaaacagagttgtggagattaaagttaaaataaaaaaaagtctttttgttttgttttgtttaatcctattttctcattatttatctgaggtaatcaagatccagagaagtccctcccttgccctacatgggatagcagggggttccgcaaggattctgtcctcgcactgactcccactcccagtctgtgtctgcttttcataccaaacactaaatatgttattaaacaggagaataaaagttgtgaatatcaccctggcctagacagaaacacacaatatatacaataccatactataacagatattctactagatatgagagagccaatacaggctaatgaagaaacaagaggaaaagatgaaaaaaatgacatctagaggtattcgtaaaataaaaatctaataggtaagtaggcatgagttaatctgatctttcctctaccccaaattatttttctgccccaccgtctaggctagaatgtctacttcctgcttctgtgcctatagtcatcttagtctttgtctaagaacttggtcaaaccagaacctttaggtattgtgactccatcagttaatccctatggatattttgcttcttagtaacattctgggataacatttgtagactgctttggttattaacaaaaccaacaacatggagctttaatgcactctctaacttgagttctttgtcttgtctcttttacagctgcgttttctctgtgacaccaggaatcagcatttccattcaaatacagcaaactttaaaccgctttttgacaggaggaaacactttctgcctaatgaaggggatgaagcaggtaacccagagagtatctgccacacaggcctcctctacagtagctcagaattgcactgtttgattatttcttacacgtggcatctgcaaattcagaaaggtgagtgatgtcagatctaaaggtcccttcttccatcttggttcattcaaattcaggtctaagaggaaacattgaagaagctatctgaatttcaacaggactgattactttccaccaaaggctgtaggagacacagatttaaagagtgactagggggttaaacataaacatatattgacagtaattcctgcattgtcatcaaagtgtgctcatgtttgtaggccaactcttagtggtattcagacattggaaaactgtaaaaccttcatgcatttttaagatgacttctaaaatattttattattagtttaaatgtttaaatagctacaaaggttgtaaattccactgtaatataaacattgacattttcaaataaaactcagaatagcttttaaacatatccagtgaaaccttaataccaaagtgatttgatacccatcaacacccagttaaaattcacaacaagctcttcattgacaattgaagaccttatattgctcttttctttccttggaatcatatttccattcaacttctcctgcagaacttaattttagtatatttttgtttaaaggcttttgttgatcacccaaaatgcctgcaacaaaatcacgtaaaaaattgaaattgcttttaaattttctctgaccatactgctctaattgctaaaaattatctttctagattgagttataaatataattattgttgatgtaccttttattaaaacaacaaaaatatatttcaattttagttttaaacttacaggcgaaaattttttggaaatgcatttcttaagaaaatcactggggtcggcccggcgcagtggctcatgcctgtaatcccagcactttgggaggccaaggcgggtggatcacgaggtcgggcgattgagaccatcctggctaacacggtgaaaccccgtctctactaaaaatacaaaaaattagtcgagcgtggttgcacgcgcctgtattcccagctactcgggaagctgaggcaggagaacggcgtgaacctgggaggcggagcttgcagtgagccatgatcgcgccactgcactctggcctgggcgacagagcgagacactgtctcaaaaaaaaaaaaaaaaaaaaaaaaaagaaagtgactggggtcatatttatggttaattaaaggaggcttccttgacaccaataaattgtccctttgtttaatgttccaggggtgtttaaactgcagggcaatgctgcaaaaggagattccgtcttgaataaggttggggaagagcaattatgaaatttgagacgggaaacaagaaccacagtcaagctcttgaacagatcacttttaggaaaggttacatacagaagttgaagatctggaaattgattcccttaaaatacataactgttgcctagtttgaaaaatcactgcattagattgctctccacattactgatttcattctcagccagacttcatgaagtggtgaggtttgaggaaaatcagcaagagattttaatgacagagccttgagtttcagtaaacctgataaatttcctaaaacttatttgacatttctggcttgaaagaatagctcctgatgaattagaaaattatgggagattgagttcttgcatgacacaaagtcatttaaacatatatctttatcttgggaaagacagtttaaatgtcatggccatttattaataatattgtgaaaaaaagttatcccaatcctggaaaaaagaaaaatgatggttgctagtctttttttttctctatctgcaagagcattttcaagtaagcaattatctggcattcttggggatcgtaactttgttgtcagagcatatttacctagcaatccataactgagaaaaggctcacatagtttacattcctgtgggttggaggttaacccacagaaatggaagagttttgcgttcatagcctggaaaaaaaaattaaccccagattatcgtgtcaaccctaatagcattttattttgctatctatatagttgtatctttttcctgtaaacatttgtggaattagctttttttagttaatgattaagaatagtaacaaaatgtgaacccaggctcactccctatttgtattagtattttgttttttagcacatttaaggccatcctggcactaaatcagaaaactacttcctgatacctaaactataaaatcctggtttcatatacatctgaattaggcaaaaacatagctggctattatttatttaatttgatgtcttaacatgtaaagattttcttttcagaagaaatctaatggaccagatgtcctgaaacactcttaattatttttcagtagtacgaacatagccatgaaggcaaaggaaggtagatgatcaattcatgttaagagtttcaaattccatggactaatttatatctttctccacagccacctggcacattctgcctttgaacagatgctttacaaaaacataatctgtggacatggagatcttgcataaagcaaattctctctgatccacagcttcactgaggggtttcagttttctaggccagagtgactgctggagatgaagagattctatcaaacgtcagtgtaaaattgtctcttacttaaaatgccctcattgatcttatcctgatacccttactacagaagtttatcatgactcatctaggagataccagagagttcactagccaattcaagagcatgacttctcaaaattctccatgttttcctctttccttcctagctaatcccactttctcctgcctttgaaggctatagcttctctgccaatttcttgaattatggggttcctaagccctcttctatgttatccacagattctaggcaatcttactggctcctgagcctcgaataccatttaactgctctagactgacaaacctgtatctctagccaagactctccttggcacagacacactattgggctccctatctcatcaccccataggtccaccttctctgtgtccccatcctagtaaacgaagccatcagtgcctccaacatgttctcttcagtctagccagagttattatttaaaaatacaagtgcaatctgtttgctctcttgcttaaaactaatcagtgacttccagtttcccaaaggatggaatcccaaatcattactaaggctcacaaagcctttctttctctagcttattcctctggtttcatctttcatctttattcttcacccatcttgcactctgtgcttaatatctcctgtttgcttccaggtcctctctccatccttccacaccctgctttgtgccccaggtgactgacctatagggattataccaataagctatcttgtcttttggtttccagtaggtttttgcccaagggcagtacccacagagaacagaaaaaacgaggaaagtaaggtcaggctatatattcccccaacttcctcccttcccacatactgacattaacccacaatcagctccttacggtggcctctccaaatagcctgtctttctccaggttttggtaatcactccctcctttccattcaaggcctggagtgatgctagtcccaggttgtagcactatctcttatatgttccctgctcactgcttgtatttttataactagtgtcatgtttctcaaattacacaatttcagtatgccataagtttcctaccagaacccagattgatactgtctgctttcaaatcctaaaaggtgtcaactatggcttaaatgttccttatttcgggaggccttttctagccgtcttgacttggatgtaaccgcctgctaaacctcctacagcaccctgtccatctcctgacagaacatccttcacacttagcagcaatcattgaatgagtattagtgtcgccttctctaaacaacaaacaaactgtgtcagaaaaatataaagcaaaatttgtaggaaatataaaaataacttgataacatattcattatgggacaccttaatatctttttctcagagagagaaagagagagaggatgatggaaaaaactttatattaaacatatagctacagaatatttacaaaaaaatgagcatataatatgactcaaaaaatgggaatcatataagccacattgtctgaacctaatgcaataaagctagaaactaataattaaaagatagcaaataaatgagtagaaagagaaccacttataatattctaaaacattttcaggtcaaagaactaagagttaaaattacacgtcactaaaaatgaaccctaataatggtactacataaaaaaactatatatttgttcaaagcaatattcacaagaaaatgcatccatctattaataaaaagtaaaacaaaggaggcaaatctggcaattcaagaaataaaaaagaaatgagcaaaataagccaaaacagagaaggggaaagtttaatgataaaagcaggaattaatttaaatgcaaagcaataattagaatgtacaaataaaggcaatatttctaggaaaactgataataaaaaagaaaacacaaatgtgcaatgttaagaacgcgaaaggtgctataaccccacaaaaaaaagcaatttttcaaatcactggttaatgccttgtatacatagatcttgatgaaattggtggtgtttagaaatatataactttttaatttaaacttctctactttctaaaaatttatactattttacaattccaaagtcaatatcaaattgtaaagaaaaaaatcctgaattctgcctcttcttccttcttcacatacgcagcaaataaatgctacacatataccaactactatgtctcgactctcctatgttttcatcattaaagaaaaaaacattgcattcctactatatgccaatcattgcactacacactgggaaatcaaaaatgactatgagaaattccctgctttcaaggagttcatagtctagtgcgagaaacagacagatgtgcacactgattataatactatgtggtacctgtgataatgcataataatgatagatgtctttactgagtttctgctaagtgtcaaacaccttccattcagctgagatcttgtcctttcctccaactcttacccgggcattttcacataatagctcgttatcatctcaatttcaaaacactttttgtactcagatgcttctccaatttcccagtttctgtaaatggcaccacaacatttccttattcaggcttgaaccttttgagtttatagtcaggtaccaatgcttgtcagtttttcctttgaagtgctattgaatgtatattttgtttagaattcccatgactaccaccttattcaagtccttagattgttcccaccaagttgaaaggggtgtcctccttcctcttcattattgaagtctctttcttgctcttctcccctatcctaccagctcccaaccaccctctgaccctctgcaccactgccacacctttctttttaagatatcttttcatcatatccctccactattcacaatcttacaacagtttctattttctcatgaatataagccctttgaagtagctttcagtgacttccattatctcctcctcatttcaccaatttatcctcattcccagacactattacccagactctgttttctctgttagctggaccattcttcacactttctcaaagacatgtcatcctcactcctacctctctatatttcctgaaatagcctttagtgcgtgctctctctctctctatctaaacattatgtgttttttaggccttagctcctccaaagagattgtactaaattcctatagcctttcataatttccctctcttttgacctcacgtacagcatacacaaaaaaaatgcacccaatgctatgctactgtacaaagcagtgtactgctttgcactgttaactttaactctatgtgcattattttaatctttctaactatcttacaactccattaaaaccaagactagatactgtggaattatttaatacccccacccacctcatcatttatcacattacttgatacttggtgagtacttgctgggtacatttgaatgtaatgtcttttatttcttaatgtctttcattttctcaagtgttgttaaaggcaaaaagcaatgttggatggttttatcagttatgcagagttcatgcaggaaaagagatttcagtgggaccttgcttaagacaatagagaatttagtttaggatttaacaggtctagaaattaatgtagaaagctgtcccacaaagatctattatccagaatatgtaaggaacctaaacaattgaacaagcaaaaaacaaataactccatttaaaaatgggcaaaagacctgaacagacatttctcaaaagaatacacgcaagcggccaaccaacatatgaaaaaatgctccacatcactaatcaacagagaactgcaaatcaaaaccacgatgagatatcatctcacaccagtcagaatggctattattaaaaagtcaaaaaacaacagatgctttcaaggctgtggaaagaagggaaaacttacacactgttgatgggaaggtaaattagttcagccactgtgaaaagtagtttggagatctcgcaaagaacttaaaacacaactactattcaacccagcaatcccattatggggtagatatccaaaagaaatcaaatagttctacccccaaaagacacatatactcccatgtttattgcagcactatctacaatagcaaagaaatggaatcaacttaggtgcccagcgatggtgaattggattttaaaaatgtggtacatgtacaccatgtcatactatgtagtcataaaaaagaacaaaaccatgtcctttgcagcagagtgaatgcagctggaggccattatcctaagcaaattaatgcagggacagaaaaacaaataccctgtgttctcacttagaagtgggagctaaatattgggtaaacatggtcataaacatggcaacaatagaaactgggactactagaggaagaaggaagggagtggagcaagggctgagaaactaactttcaggcgctatggtcgctgtattagtcccttttcatgctgctgataaaaacatgccaagactgggtaatttataaagaaaaagaggtttagtagactaacagttccaagtggctgggaaggcttcacaatcatggcagaaggcaaaagacacatcttaaatggtggcaggcaagagagaaatgagagccaagggaaagtggaagcctcttataaaaccatcaaatctcataagacttattcactaccaggagaacagtatgggggaagctgcccctatgattcaattatctcttactgggtctctcccacaacacatgggaattataggagctacaattcaagatatttgggtggggacacagccaaaccatatcactcactatctgggtgatgggatcatttgtgccccaactgtcagcatcatgcaatatacccagataacaaacctgcacttttttaccccctgaatctaaaataaaagttgaagggaaaaaaagaaagctgttccacattgattgcagtgagtataatgggcaaaaattactgcccccaacccgcagcccccaaatcctaacagaaatctgttacatacacacagacaagcatggattgagcattagctcagtagacaggtcggttgaatcccactttccagctgcatgatcataaacttattgtttaacctctgtaagcctgtttattcttctgtaaaatatagatcttgtgagaattaaatgagattatgcattcacttagcatagtgcctggcatacagtacagctcaatacatgttagttattattatcatcttttgtcctttcttccacaactttgtataagaagtgttggaggaactgaagaaaatgtgatgtgttcaacatggtacagaaaaggtacaccatgggcagatggtcaaggtgagtcatagactaacccagttcacaggagtagctactcatgttagaggagtcctaaagaaataaaagccttccttccctcccactctccctccatcaatggtccacagagttgagagaacacaactgtggtaggcatctaccattttgttcacttagaatggcaactcattcctggtaaaatataaattctaaccatgtgttatgaatggagactgctatcttacttatgaatgggctgatgaatccacccagaggtggatgcctgacccagctgaaccaatcatgttatgtatacaccactctagtcacaaattgcccccctggatgggaacctggctcagactgaagcaatcaaagacttacctcaatatttttaaatctgggatcagaaaggatcctcagtacttctttggtggctacactgtgagatgaatcccaaccaaaaaatgtttacaatcatgcctcctgctttgtggtggaatctggtctgaggaatgaaactaagacacgaatgaaaggaaaagtcttaaaggattaagttccctggcaccctggatgcctgaagtccagatacacttctgctcttgccaaggttattggagtcagtgcatttctcttcttgcctaagcacatttgagttacatttctgtcacttgtaacatcaatgagacgttaaagagttaattcactaggaaatttttaggaacaccttgctggcttacaagaagcatcaattctacgaattactttctcaggaatttctctaaatatcctgaagagggcactgtttccattcataacttctgtccaaacccacccccattcttttgtttttttttaatttttctttttatttcttttttttctttttttttttatgaaagggagggactgagtaaattgcaggatgtgattctaattggttggaacatcttttgaaatcgtgtttctgtagagaaagaaaaactaccatatttggatagccctggccaactttcaaggctcctaaatctgagttttcagtgaactggacagaaaaaaaaaatgaagaagctactagcaatgattctgtggcttcaactagaccgtgagctgggggttcattgaaaagggagccatgggaggaaaggaattgtccatacaatgtttgggggtagagacaaggttcaatgcgactcatttgggttccctcgggaggaacaggattattggggtaaccagtgaatgcctccttctgaaatgttctctttggacagggttaagtggagagctgaaagtggaacaaaaccctctgttcctgagcatgcaggagggaaaaaactataccatctactgcaattattcaaccacttcagacagactgtattggtacaggcaggatcctgggaaaagtctggaatctctgtttgtgttgctatcaaatggagcagtgaagcaggagggacgattaatggcctcacttgataccaaagcccgtctcagcaccctccacatcacagctgccgtgcatgacctctctgccacctacttctgtgccgtggacacacagtgctcccctgacgccaccagtctgtacccaaacctgcagctggtgggcccactcctcctgcaggaactatgactgtgaggcttcgttcactgtctgtacatttctttctgcaaggaaaattctgagatgggtgaaaaaagatgctgttttaccttcttaactgtggaatattttttaaaaggaaaatgtgttcaggctgagggaagattcctaaccatgtatttcctgagaatatgaggtctcattctttactgcctcacagtcagaatttgttagtcttccattatggaataattttacatgtagtgcaactgtcacaaataattcctatgaaatatggaatcattatttgttttatatgtgaatgtaacatatggcatttaccaatgaaagaaagaataaatgctttataaaagaatggtctatgtgaggttccttacctagtgtttcctgctaaaatattgactacagtagtcagataatatccgtgtgatctaagtacctgtttatctcaatgtgtggagagtctctgggaaatgtatcctttggctggatttactccaaaactatctgagggtccttgccaaccagaagaatattatattttttcttgtattatttgccagtttcctcttctcctccctccattttttttttgtaattgttttgctacatggtagaatttatattaaactttatttgcccattgcagactagataaaatgaatttcactttcaggaaaattgtcttataagaaatccccaatttgaatgttatacaaaaataattgaaaataagttttcctgtcccactaatgagataatcagtaccttcagatatcaattgcatcatattttcatcccagacttctaggaaaataataaacttgattcagtcaggcttttaagtgacaatatttcagaaattaccattacaatgtaaaagctgaccttaacatttcaacatttgtaccttcctaagcaacagcacctttaaaaacatttaaaaactaaaaacacttatttctctaaattgcccctagagtctttacaagcgaatcagcttctgcagcaatttgttggcagattatgaaaagtcagccacagcagtgtacagaccaaaagctcctgctaccactcagagcctccagcagggactataataacttccgtatttagataaaataaaatttgacatgaaaaaccgactagttccatcatcctttgagtcaagcagaggtttcactctgacagagtaggctgaaaaaactttgaccttgtatttataaatactcacaacgtatcttaaatttcaagtttcttgatctgttaccaaagcaagtttccttgtcaatgactgattgtcgggaaatttttattttgcattgatgatcttatttgttgtgttgttacataatcagaaaacaggatgttacatcagattttctataacctttctggagcatttaacagcatgtcttcacacactcatttccatgctgaaaacattttcaccaggaaactattcatgacggggaaaaaaatattgttcaatccaatctaattaactgaaggaacaatattgacttaagtccccaaatctcttccttcttagagagaactcttggattctgaagatgaacttttatatcttcttcagatcaagaatataaacaaaccctaaaacaaatgaatagaactgaggatttcattaatttgatctttagaacataaaaaactaagttctttccacttctccttcccaattttcctgactccttcccaacttatgagtatatagattttttgctttcttttcctagaatcacttactgtcactgaaaatatatcattaaaccttattctcgaagaaacaatacagacattcaaaattgaaccagttgactttaagggtgtgatggtgtagtaagaaaatactatcgaaggtgacaatctccaatacattagagcatgctaagccaaatatgttttcccccagtaggacctttaggaatgtctcaggtgactccaagcttccggcacttgctgtccatgaccagagcttctactaacaagaagttccataaaatacttggatccatcctaatcagatacaccagttgccaagtccacttaccacagagattaggaaaggagacatttttctcagttgtgctattcatgtcccagaaatggcatttaagacaaataattctttgagtatttcttccaccctgtctcatctgttttggtgtgaactagtctcttttttcattgcttttaacacagctggttattttttcttttaatagtgtgtctgcttcaaggtttatctagaagttgtttcttaatatcaaaaaagttaacattttttatttttactgaattatgatcagagaatgcacctgtatgagctgtactttttaaaaactttcattaagatttacttgaaggccaagtacataatcataataattttattggaaagctatgaatttatatatatgtgtgtatctatgtattcaacttttttgatcatatcattaaatcttcctatgtccttgtttccattttctaaaatctgtcacattctgaaaaagactatcgaaatctttcacttattttgtcaagttcttgcaaattgcttttgctttatctagctgcaatgttttcggtgtatatggtttatgacttacgtctcttcagagagtctttttagcattaataatgtccaagaaattatccatctcttctagattttcatcattatataaagtccttcatcctgtgtggtgcagcctgatattttttcctcaatatccattctactgtcttccccttttttactctgccccagaataaaatctgtgttgcccagacctccttacagctaagtattggcatgaactaaattctggtcaatgaaatctaagtgtaaatatgaggtgcaccttctaggaatttatctaagactcagtatgcatgttcttccatctctcccagctacctggcctcccatcccctttcctgctggatttgttgatcctcggagactcaagtacatccttcacttagtctatgcactatataccttcttcaatgaggtccctgtgtcagggacatggttctcagtttccagctactttccatgagctccctcaagcaagcaaatatttttagaaggtatttttagaagacaacattttaaaagaccatagtgtcctttctactctactgtgtctgcaatatgttgcagtagaacatttcacaaagctagatcttctcagagctccagatgggaaccaggcaaaaagctctctttgcagcggacagtcaacctatcttgtggtttccattgtccgcattcctagctcagggttttagataggatttgtgattttttaaaactgccctgaaacctcaggctctgctcttgacatataaattatcaaaaagaaaaattaccaagtacctgtctcttgcaactcaaaaaaatgccttatttcaggatattttttcctcctaagactttttaagtccattttgaatacaaaatcaataatttgaccctttgatctcactggatcctttcacaatctccctttactggagcaataagattcatcctcaaaatttgtggcaagagatttacaggggaaaaaatgaattttaaagaaggaaattatcatatttgaaactgttagtccactccatttagactcagagattctaataacacaacagtgtgaacaccagatttggttatcagaaagaattcctgagtattcaaactcttctactgtgagctctatgcccttaggcaagtttcataatgtatttaagcctcacttttctcatcaaaaaaatatggaaaaaataataaccactttctaaagtttttatgacatttaaaatgagatggtgtatatgtaaagtaaacagcacacacaccagatcttctagaacagtgtttactagagaaaattcataaagacaagagaaagagcaggtgtgtggtttccccagaggcagcactcaccctacattctgaaacagcacacagcaacctagcatggccaatgtgagaccctaagaaagagaacccagtcttgagccatggaactttaaggctgcactggggaagcaccaggccttactgtagcatgggggctgggctccaaattatgtgattatagcaaaatcaaggaaatctgcaacctccagtcctgatctgccacctcagctctcttacaaaatttattgcctcaagtgctaggctggggctctattagaaccagttccttctctggaaggccaccctgcagggaatccattacccttacctctcagtatgtgaaattcactagcacagagcctggcatgtagttggtataaatgtggaatgaatgtgtgcagccatggaggacaatgtcttcagtccctttgtaatgcagaaagtgtgcttgttctcagatcaaataattaacttattgaacaagtgtttataggtatctactaggtaccaggctgtcttctagacacttgaactatcttcttttaaaaaatgcacgaagatatcagattttatagaaaatacattctagtaagcattaaccataagtaaattactatatggtttatgacttcagagagtctctttagcgttaatatattttgcattacaatatatgagaagataagtcggacgggcgcggtagttcacgcctgtcatcccagcactttgggaggccaaggcgggtggatcacaaggtcaggagatcgagaccatcatggctaacacggtgaaaccctgtctctactaaaaatatatatatatatatataaaattagccgggcgcggtggtgggcgcctatagtcccagctactcgggaggctaaggcaggagaatggtgtgaacccgggaggcggaggttgcagtgagccaagatcgtgccaccacactccagcttgggtgacagagagagactccgtctcaaaaaaaaaaaaaagaagataagtctatggagacaagaatcagagcaagttaggggatagggaattctggagggggccacagaagggtggttcccttgtaattttaggtaaagtgtcagagtagcctcactggaaggataacatttgagcaaaattgaagaagatgagagagtgaatcttgcatatacttggagcaagttttccaagtagaggagagtccggtcctaaattaggaaatgcctacatgttctagaactaggtggaatgagaagccataggaaggctttgagaaaggagtgataaaatctgacttccatgtaaaagtcttactctggctgccgtgctgagaatagactgcagatcatcaagatgaaagtggggaaaattgttgtattaacattaaaaccaaagatatctggtgttactctgagctcagaggcttcttccaccagaaaagctcattcaagagcagctgttgttactgctcctgctgatggaagaggggctaaagacatatttgatagcctttctgtagatctcttgactgcagatgacctgtgagtttaggggaaaatgacaggaaggagtcttaatttcagacacaagaaggtctgttgtgaaggcatcttccagaaggcaatatttgtgctttcttctgttgtgtaagactccctactcaaatttaggcagtttaaggaccttagaaaattgtgctgtggtgataaaggtaatggaagtcagagcagagggataataaaaatccatatgcctctttgaaagcctgtgtaataaagatatctgctgcctcaccgatctgaacagggttgaataagcaacaaatggacaagaatgctcagtccctgagctaccaggagacataggcctttagtgggactgcctatataatttacgggacccagtacaaaatgaaaatgcataacttcctaagaatttgaagactgcaacagcagagcattaaagcatgagttctatgagactgtacaggtttcatacccaggaagctggccctgatcactactagtttggaatgccatcattattcagatatcgatgttacaggcaggagcatgggaaagaccttaaattaatttgataacaattcaacctagtggcatacagaatgagggcaaactaactgagtagtttggtgtagaaaagaagcacctcacctcctcaaattacctctgagatggtgagatgccctgtccttttgacatctacatatttaatataaactcttcacctaggaccacagcagtggcagagatccagatgctcggagagatctatttgcacaagaaaaaatatgcataaagaggttaatagtcaaaccaaataaggggctgagttgtaccgtgagcttttttacaacttcaaagtgggaaacatttattgcccttactcatggtgctgtctaaagaataactttttactctcctgaacatttcagggttctactcttattagagaaattgtactattatcattttatttttaaaatatttttagaaatgggggtctcactgtgttggtcaaactcttgagctccagccatcctcctgcctcagcctccaggggagctgggactccaggtacgcaccaccccacccggccactgagtcactattaaaaatcatttagcatagccaggcctggtgtggtggctcacgcctgtaatcccagcactttgggaggctgaggtgggtggatcacctgaggtcaggagttcaagaccagcctgaccaatatggtgaaaccccgtctctacttaaaaaaaaaaaaattagcctggcatggtggcacccgcctgaaatcccagctactcaggaggctagggcaggagaatcacttgaacccaggaggcggaggttgcagtgagccaagatcacaccactgcactctagcctgggtgacagagtgagactccatctcagaaaaaaaaaaaaaaatcatttagcatacccagtctggggctttctactgagagcctttgttgacttctcttctaaggcaaagagcagggatataaagaagtaacacttcgaaagatggatgttctagttacatttctaggctctgaaatcaaatacttaatccacatattgactgattaatttatccaacaaatattaaacttgaccgacccttatagtgtctggagcctagtaaataactattgaataagctgtgaacagacagccaagtcctgcggactcagagaataatgagacaaatcagatattgaatcctggcttcaccacttttgagcagtgtgacctggagcaatttgtttatcctctctgatcatcaatttcctcatctataaaatgggaacaataatattaacacctattttcacaatcatgtggattaatgtatgcagagcctctggttcatcactaagcactcagtaaatattagctatcatcatcatcattactaatttctattgatttaactagacacagaaagggcagcatgtgtcttacaagccagcgcttccctcttctaaccactaattcaaaaaggattgtaagtaatgtttagaggtcactccctagcccaaaataggatgccactgtgttgtgctttgttttctttcttcctccagtgctgaagcacttgtgtgttttggttaatctaagatttaaaagattcctacatgtagtcatgcaaagtacttgtatatacctctaaggacctagcaggtctagtgatcctggagtctcatatccgaaagaggaaccagtactaaaagacaaacttcccaaaatctaaagaagggaagtgcaatcaatggtatgagttagaagcctcaatcctgggagagacagcctgtgcaagccaggagaaatcatgggttctccagtccccagcactggagcagccatgatcagtgcctccacttcaatgcttgtgaggctgttactctctggtgagcaaaatgacagtttaaaattttggctcttttataatttctcttatttctcattttgttacttagattcaatgtcgtttccattcattctaataagaactttggctttccaggaagaaccactagagactcagtgaattagacacagggctatgtgaccctttcttcaggggcacacctgacgttgaactgtacctacagaatgggtaggtaccttcctcttgtggtatgtccaatatcccaaagagatatcaaaatgccttgtctctgaggcatcatgataaatgaaaaggaagatttcaggcccattaagttaagattaaaacctctttccacttgcagaaaacctctatccaagcactaggcacaattgtgtacttttatgttcctaatgacacagtaggggagactaacagaggagttgagtgcaaattgcaaggggtatgagaggggctgggtgtgagcagtttctttttcctatccagacagggccctggagtgcaggagtgtatgtgggaagttggacaggcttcgtgatttgctatcccaggttaagtagcacatgagactgcatcttagaaatggggaaaggaaagatttgtcaaaacattgcccatatctgtcctctaattatagctcactgatcaaaactacaagcctagtaatgtaacgaaggaaagttctttgacatcagttatttaaaatatgtacaatgtgattttctgaaatacctttgtatttaaaatgtaatttaaattacccttaaaattaaaataaatcaataactgttttagtccattttgtgctgctataatagaatacctgagaatgtgtaatttatgaagaacagagacttatttcttacagttttggaagatgggaaatccaaggtccaggggcctgcatctggggagggccttcttgctgcaccatactatggccaaaggcagagggcaaaagagtgcatgcaagagggagaaacggataaagtgccaaactcattcttttatcaggaacccactcccaagatatctaacccactcccatgataatgtcattaatctattcatgaggacagagccctcatgaccttttaaaggtcccacctctcaacactgttgcattggggattaaatttccaacatatgaactttggggggcacattcaaaccataacaataataaaacattaatattcctggggaaaatgagcaattcacaaaaagtagtacaaatggccactttataaagaggtatataaattctttagtcatcaaagaaacatttaaaaaagtgattcattttttccagctatcaaaatagtgaaggttactgacacacacacacacacacacacacacacacacacacacacatatcatggaatttttttctgttactccaagaacctcctatggcaccatgagtcttgagccatttactatgtaaccagaaataaagactgcaaatactcaactgtaagccaagccacttctagtctaagtgcaagattgcatatttgaagagaaatatttccatttctgagaaaccagataaaattatgccaggactgaggaagaaaaaaagagaaaaaaaaaaagagcagtcaggaaaaaaaaagcagtcaaaaaaaaaaaaaagaacaaagttaagtagactttgcaaaatgacttcaattgaattacaccatcattatcaaataaatcttcaagtccagataaaaaaggaataagtgtaccctcagcactacccttttctagaagagagaaccaaaaatatcttgattcactaccgttttcagtgaagaatattgcaaatgtgaaagatggtaataacaggagcaatcaaacaatagacagtcctgagaggttactgctcttttactgtaaagctaaactttgaaatgtgaatgctaagtctttgttaacacaattataataataattacattttagatagaatttcatatttattcttgcattgttgaagttaattctattttttgatattcagattcagctttagcttcccccagatattgactttaacatctcaccattcggcatttggtcacaatgtgtgttcagtggaccatgttttaaggaaataattagacgtatgaagagggtttatgtaagcatagatttatcacaatgttgtttgtaaaaactgaaaatattgaaacaactgtctaaaatactgacatgttgtgatgtctaagttctagtggaaattattctcccttagaataagtgttgtagcgataacagacttaggagtgtggtgagtcccctttgcacaaaaagaccacctcacacccaacatgactcttaagaatgaggacagtagtgaggacacactgcagaacactgagaggcagatgacgtcttataacctgttcattaacttgccacttgggggtgctattcaccagtgaaatcataatttatgcatgaattctgagtacaactgtgaatcctcacttcaacagtgatgccctctgctaggccagagacactaacaatgaactcctctctggactttctaattctgatcttaatgtttggtaagtacattttattaaaattttttgtattatttcaaaataataaatacttctccaaaagatacaacaactctggccaaacccataaaatcagtacttttttccccctacaggaggaaccagcagcaattcagtcaagcagacgggccaaataaccgtctcggagggagcatctgtgactatgaactgcacatacacatccacggggtaccctacccttttctggtatgtggaataccccagcaaacctctgcagcttcttcagagagagacaatggaaaacagcaaaaacttcggaggcggaaatattaaagacaaaaactcccccattgtgaaatattcagtccaggtatcagactcagccgtgtactactgtcttctgggagacactgtgttaaaagcacagtgggagctatacaaaaacctcaaaggctcagaggaagtatgtagtgaggctggaaaacccaggttgtagagccctgttctctctttcacagacagtcctgttaagacattattagaagataaggaaaatcaaaatcagatataactgcctctaattccagggggcacaggggtttctttgacagaaaatggggtcagggaagagggtctcagatgatatccctgctctcaattaggtcagttctctcttgtccttcaggctttcttgcatgatgtgtaggaattagaatatgatgacttggatgtcagtcctggctctactacttattagctatgcaaatttggccaagttaattgatgtctcagagctttagtttttttcacttgtgaagtagaaataaaaataatcacacaaatttagcatggagataaagtggaaaaaaggtaggttaggaaggggcagattagtactcaaagcatttctggaacttgcaagtcccaccgtagcagttctgctctctcacagcaatctctctgcctagtgctgaccatcctaacagggcttggcatgcccactgctttgtcacaccacaccacaccccacgccacgcccagccccaggccattatgatcaacatatcatcttttctctcacaggctcctactgacactacacacaaaaattaactcaaagtggatcatagacctaaatgtaaaaactaaaattgtaaaacccttagaagaaaacatagcagtaaattttcatgatcttgggttaagcactgatttcttagatgtgacaccaaaagcacaagcaataaaatagaacattgataagttggacttcaacaaaattaaacttgtttatgcttcaaaggacaccatcaagaaaatgaaatgataacccacagaatgggagaaaacatttgcaaatcatatgtactatgtacccgatgataagggacttgtatttagaatatataaggaacttttacaactcaataataaaaagaaatataactcaagcagtgagcaaaatatttaaatagacatttcttcaacaaagatacaagaatgtctaatatgcatatgaaaagttactcatgattagtcatgagacaaatgcaaatcaaaatcacaagatatcacttcgcaaaagtaaaaggctatgactttttaaaaaggacaataatgagtcttatcaaggatgtgagaaattagaaccctcatacattgttggtggggatgtaaaatgatgctatcactttggcaaacagtttggcagcacctcaaaatgtgaaacatagaattagcatatgacccagcaattccagcccgatgtatctacccacaatgcatatgtccccacaaaaacctgtgcatgaatgttcataacagcattgtttatggtagtcaaaagtgtaagtaatccaaatggacaaaccagatgtggtatctctatacaatggaatattattcagccataaaaaggaataaagtactgacacctactacaacatgaagaatcttgaaaacattatgctaagtggaaaaatccagacacaaaatggccatattgtgtatttcatttatatgaaataccaagaataggcaaatccaaagtcagaaagcagtgtggctgccagaagctgaaagaagtggggagtggggagggactacttaatagatgtgtggggtttcttttggggaaaatattctgaactagatagtggtgatggttgcgcaacattgtgaatacactaaaagctaccatattatatactctaaagtgattaaaagtatgaattttatgttgtgtgacttttacctcaataaaaaagaagacaaccaaaaaatctaaatgtgattcttaatgggacaagaagctctaaaaaaattaaattcttactattccattgcaaacaattccaataagtatgtgaaatatggagccatctgataaaacctatagcagtacgggaaggtatactaactcagcttttaactaaaaattatacaaatgttgactgacacaaaggcaaaggagaatagcaaagatggcatgagcctttaaggaaatcgttaaaaagtggaaaccttttaatgaatgcagttaaggcttaaagaaaatgtgaagtggaacataaaaagcgttttagaacagtttggagaaatgaagagggtggggtggggaggaaggttaatttacatatcgaggaaaacagaataattttggtagagaataaagaagaggtagggcacttcgacccctggtttcatcctctattcttcatcaaatacaataattttgggccgggcgcagtggctcatccctgtaatcctagcactttgagaggctgaggcaggcatatcacccgaggtcaggagttcgagaccagcctggccaacatggcaaaaaccccatctctactaaaaatacacaaattagctgggggtggcagtgggcacctgtaatcccagctactctggaggctgaggcaggagaattgcttgaacctgggaggcggaggttgcagtgagccaagatcatgccattgtactccagcctgggcaacaagagcaaaactccatctcaaaaaaaaaaaaaaaagaaaagaataattttcaaactggaaatgaagaaatgaaaaattatgacagataaaaagatactaagagagaacttagatgctttgaaaatgatcaattcttctgggtcttttaaactaatccccaacatacaaaaagaatttgcaggcatggttggcaaggcattgggagaattttttgaaaacctatcaggaatgaaggaaatccccaactcaggaacacagaaatagtggatcgatacccagcaaaattctagagcagattattaacagataatgtgtgggctcttagaaaataatgcagtgatcagtaccaagccagaatgagctcactaaagacatttttaaaacaagtcctaaattcaaaggacttccgtggacttcaaacgtgtcaaatatttgcaagatatttaataatttgtttttcactatatcaatgggaaaaatatatatatattatcatttgttgagtgttgtgtttatcacaggccctgttgtactacatatgtaataagaactaacatttatttatcaagggcttaatgtgcatgaagtgttgttctaaatgctttgcatacattaattcacttaatcttcactacaacctcatgaagtaggtgcaatccttattatagataaggaaactatctttaatacagaagaattaactaacttgcccaagaacacagagttagtaagggaagacctggcatacaaatacagtttgacaagcccaaagcctgcattcttaaattctatactttgttacctcccaatgttatctgtaatccccaccacaaaactataattttggtattgttacacccattttatgaataaggagactgaggattggagtattgaatagaaaaatccagtagaatctagtaagtagtaagactaaggctcaaacctaagttcatttggatctagactgtatcctctattcactttgtcattctgcgtaatgctagacttggtgaattctcagctgaaagaacggccatgtataaatatacaatttagaaaaatgtccctattgttacacctcatgattttatccttcactttgacctgttcacattgatcttatgtaaattcacacaaggtatgcccattaaatgtacaaatagcaaattttgagatcggtatatgatgatcatgtcctaatgatctccagctaatatgtttatttacagcataaattaaagattgaaaatcatctgaacaaactggaaagatagactgaaactgtcaaaatagaatttaatggagataactatatatttatacagtagttttataaaaatgagttgtaatgtctggaagaagggatcctgaatttttagtatttgttgtgtaacgcgctcatagtaattaaggaaaagattttctgaaaggatattagaaattctcataaaatcaatttgtgcaaaatacagctaggactcacagaaagaagaaaatcaccaattggctatgctttccgaatctacttttctctggatgtatgatctgttctcctcctgggaaaccagattccactgtaagcctgtcatattctactccacaataacttcagtttgaacatacccagctctgtttgctaagagatgagtctggtttgaatagcacagggctttaaagctctagttacactgtctaactgcggtttctgtacctctagttcaaattaatgagcgtagtatcttcccagatccaataagctattgccagaaaaaggaggttatttggtacaagcatgacctctatgtcatctctttagaaaggaatcccaaaagtggaaaaggactacatgctcaaaataattcaccaatgtgataaaacaactgaaactatcatagataacaataaaacaagtggaaaccagatgagtacagtaatactctgacagggcaacaatatttgaatcacatttgaagagacgtgaacaaactgtagcaagtctaaaaataagaaagataaaactaataaagtagtctgaaataataccatgtgcagaaagaaacaaggatgtcacataaagaaaccagagatatttataaggacacctttacaaaaaagaacagatctggccttgagttttcaaaagatataatgtgaaatgcagctactctacttgatctatcatagctggctgaagtctaacaatcaacaagcttctgttctcccacactaccctcacctttcttctaggactcctagtaggaggatgctaagtttggttctctatctgtattgtgggtgagaggggctgtttgtttgttttagagacagggtcttgctctgttgcccaggctagagtggagtaacatgatcatatctcactgtatcctcaaactcctgggctcaagtatttgacctgcataataaatgtctacgcctcatgccactaggtggcaatgtgggtgttatactgaaaagatcacagatggttcactttgcaagtaaaactgtaaatgttcttaagtgtgcatttctgctgcttctgatgggctgaaaatcccctttgatttctaaagtaaatgtagagacgttttaaaaataaaggactcctttgtccaagatatattccgaaatcctccaacagagacctgtgtgagcttctgctgcagtaataatggtgaagatccggcaatttttgttggctattttgtggcttcagctaagctgtaagttggggagtttcaggacatgagatatttttcaaaattctggggaggggagagaagggactccaagtggctaatctggaggccctcctgaaaatgtgtaaagaaatgtgtataaatattgcaataattgtaatattctgtatctgatgatgtctttgagaacaggtgtaagtgccgccaaaaatgaagtggagcagagtcctcagaacctgactgcccaggaaggagaatttatcacaatcaactgcagttactcggtaggaataagtgccttacactggctgcaacagcatccaggaggaggcattgtttccttgtttatgctgagctcagggaagaagaagcatggaagattaattgccacaataaacatacaggaaaagcacagctccctgcacatcacagcctcccatcccagagactctgccgtctacatctgtgctgtcagacacagtgctccccaggcacctggagcccgtacctaaactctaaagttgaggcatcatttcttactcctgtctttcagacttgtctgtctctatccttggtcagatgatgtaaaatgtttaagtttttaaaatataatattctccccttctagaccatctctcttctctacaacatcatcaccaattatgttaaccagacagtatgtgatttttatcttgaaagtaaaatatacagggtataaaaatcccgattctgctacttattaactggatgatcttgacaaagttacttaacttctctgtgcttcagttttccctcagctataaaaaggaaacagtgttagccatggtacgtaaccccaattgtggggattacatgaggtaatatacacaaagggcttgacacatttcctggcacgtagtgttacataaggggtatcaattattagtattagttttagatgtaccatgagtttgctaatattcactatggattaataccacagatcattggagaagtatgtggaatataaataataagcaccttataataattttagtttttagattctttcctaatgatgtccagcacttggcctttttaatagtgttaagaaaaacagggagtagctgtagaaaacgtaatagaaggatgactctatggtttggtttgtggtgtggaaatgaaagactggtaagagatgtttctgaggaagctcagctgcttctttggaaaaaaggacaggttctaagttttcatgtggagatctctaatggaaacttgcatttgtggaaattcatgaagcaaaatatcaaacccagtgtatctaaatcaacggttctgtatatcccccaaggattctttacattactattcccaatcccagtggaattcttatatcaaaacaagttttatgattataattgttcttattactcaacaacatcaatcacatatattaaattacagctacattcttttttaaaatcaaaggctttttaaatcaaaatactacctgcacatatctaaaaagccaatagtattataaaggtctgttccttccttagcccatcaagaaaacagaaataccatgctctacccccaccttccaattcaaatccattctagcaatttctaattaatatgtatatactcttgatttatcattattaagcattatctattgacttccttctatggcagcatgcaaatactctcactttctcaacatagttatatatatatcataagctggggttaaatagacagtcagtgcatatatgattatgaccacatgaatattgccactgtccaaccaaaatgacaactatgagtatatatcctttctggtacaacgtattttcttagttaataattacatttttttcatttattctatgtcaatgtgctattttttctaagttcttcaacacagtcttaaaaatatttattaataatttctctcaaatgcttcaagcaccttaatttcttttttttcccctcaagattccctttcctttgacctccattgtttctctgtgtgaactgattgctctataagcataaatgtgattctagacattttagtaccactctcccaagttggcattcttgcattttggatctcatatcttcatttcccaaagacaaatactagagagaaaaaagggagaggaagaagaaggagaaagagaaaggagaaagaaacactcttgggctcacttttgaacaatgagagaaacaaatgaataaatggttcctgccctcccccatgccctgcaggaggaaaagtctgcggcatattccaaaagactcttcagaaggtcatgccaggatcaggcaccagtcatgcacatggtggccagctccattatgcaccattgcattggctctctccactacccaaatttgctctcttgatccctcactcctgctccatgagatcagttcccaaaaatgccctgcatgcaaacctttatctcagtctcagcttttaagggaatgtaagctaagacatgccttttctccctgtgaatagagaggacacggagccagaagacacaaccctgcccgtctgctctcagtagtgcctcatccccttcaaaagccctagatactggcctatgcagctgtcccagggactactgaccacagcttctctatcggtgatacatgttcctggcttcctgtttttaagaagtactggacacacctgtgtcactttcctgaaagaaagagtgctgagattggagggtccaagtggaattacaggctgagacagagagaagatacaggagatgctggccctaacagagagggaaaacaaaacaaaacaaaacaagaaactattcttatgaaataaaataaaaagtctccccatctgagagtccactggtctttcctgaaagccaagtcatttttccatcgaataaatgcacgagtaaaaatcaagaaaacataaacatggataaaagtttcctcatagagttgacaagattattcacagagacagacttcttggtctcaattttctcagcatcctcagagtttactgtgtggacactatgatcacagaaagaatctcaggtgccaaagctagcaattcaagttgtttctggtggaagtcagtgccctcctgtagtcaaatgaatgaactagtagaaaccactgctttggtcagtttcccctctcctgtatctggccttcagcacctcagtagatgcttagagagcacttaccaggcaccagctcccagttgatatgggaaccattagaactctctccagagaaactcagtctggcccagtgtttctgacttcaagcctcatttccatgaatcaggtagctggtgaaattgatagactgcaaactccatgagggcaggaaccatgccttggtcattacagtgtccccagtacttagcatagtgcctggagccaggagcgttctcaatgatctacgctgctttgtcatctgctctgataatgagagtttcttgatgtcaagggctgtgttttgttcatttttgtatccacaaagggattagcactgtatttaacaatagtagaaactgaagaaaaaaaaattgtgtggaattacatttcctctttttcatcagaagtgacttagtcttgctgactttctttctatgcccttgtgtgttgcctctttgtttgcttacttgatttttttgcctcactgagaatgtaaggtctgtgaggacatcggcttgtgtttcttcatccctgatatttcttttgcaaccagcccaattctgatatctagaaggaggtcaagaagtggtttttggaagaataagtgaatgtaatagttatttcggacttgtgttaaaaggcctctttgcacgatttagtagaaaaagcactggagtcttagtcccggttttgcagctaacagggtaatgtaattctgaagtcacatccccactttcggcttcagtttataacctggaaaattaggataataatacacactctacctttatcaaaaaaaatcacgatctaatctgaattagatcatgaaaatgaataccttttaaaaagtgaaaaattttaaacaaacaaaaattaatattattaaggaattttatatatatatatggaattaaatggacaagaaatattatcctaatatactccaagacaatagttttcactcccatacttatccgcactgctatacaattcagtcagtgccaaatcactacccacacacctggttgtccttattactgtggctttgcaaccttcccatcactcagcttatctaaatattctcctgtatctaaaaccagtttttagaatctccaaagagcttgttttccaacatcccccagaaacatgcatttctcaccttactgagccaaactattccccagtgttcatcctctctccaagaaaagtttttattcatttggtcattggtcaacatttttctcagctgtctatttctcaaaatgtatgttctattctactattttcttaaactaatgctattttcaccactggccaaactttgtatttgaatttgaatcttatttgaattttacattctactttggccatatctttgtaatcagaaataccagtgatagtactcaccattcggtgtacaaagtatataaaatagacatgctccatatctattaagtgatgaaaattttctaggtgattttattataaaattaaacatttttagaagaaaatgcttctttagtagattgagaagaaaatattccaggcaatgaccaacccagtgatgtcatcttactgtatatataaatattcatacttgattactactataatcaactacaatgtaaacatttcttttgaagtgctaatcggtatgaaatattctcttcaacctcagattaaatattcaccctcagtccccctcatttcccctgaaatacaatgacattaaattgcctgatctttgcattttctgatttattttatttttatttattttcctttgaggtgggctgggtacttgcaatggctaatagtgcagagctgcaattctaggcactatcagcaggtgttttaactaacacattatgtggattatttaaaaacttaatttaaggtatatgataatatagtactgctttgtatttttacaaactcatatttttttttttttttttttttgagacggagtctcgctctgtcgcccaggctggagtgcagtggcgggatctcggctcactgcaagctccgcctcccgggttcacgccattctcctgcctcagcctcccaagtagttgggactacaggcgcccgccactacgcccggctaattttttgtatttttagtagagacggggtttcaccgttttagccgggatggtctcgatctcctgacctcgtgatctgcccgcctcggcctcccaaagtgctgggattacaggcgtgagccaccgcgcccggcctacaagctcatattttaaagctccattcttagctcagagctgagccattaaagttcaataatgtaagacagcaagaatgctaaagcttgatgctaaacctattcagtaatatggaacagcatttgagatcaggaaggaggtggtcccacaactgggaattaaaatcaaaatggatttgagcagataaagctgcatgtccaaaggaagttggtgggaaaacttgaatctgccaggaattttctgctagatttactgcagatcctgccagattcaagccaagcatagaaaaataagcagaaaacctccttcatcactgcctgtgaaagaatgttgagtccaagagacgagtagagaaagacctctatagattaggacccattaatatacactgacttggcaaaccgagacctagaggcaagtacagaccacaggaccaccagatgatttactaccttggatcctactggtggcaaaagctgctcccagggtccacttccctgtacagaaaactacctcatagaaactgaaaattatatggcaatatacatcaaagagtccttgcactctgaccctgtaatttcacttctagaaatttcttctttcttaaaaaaacaatcaagtatgtacaaagattcattttttaaatgttggtgagagctttatttaaatgagtggagaaggaaaagaaaccccaatgtctcacaaaggagttgatttaaaaactgggggcacattggatataaccaataaaaatcattttatctaaacttctgcttccagccacgccgaaataacagggaccagatttaccattccacttgaaacaacagcaactgagaaggctgcagacaaatgacataaatcaacaatttccaaaacacggtatactaagcaataaatgaccatgatcctgagagatgggaaacaaatgaggcgagccctaacattgcaatagcttattgccttgagagagtttctaggccacagcacaaagaggggaaactgaggcagaacctggtaggctccctgaattgaggcaacagatctgagacagagaagactaaggcagctgaagttcataagacagaatacacgagaggagagaggggcacagagaggacctagagatctgccgagggtgccctcaagtattcagcagaatgctcatctgcgcacgcatgtggaatctacccgagggtgggtggcggcagcagggaataaccattcaaaaagattaaaggaaagaggacctcttcaagtatgtctagaatttagaaaagagtttattgcttagccatatatttcttaattctttaattaatatttcatacatttcattttctctggctctagtcacttatcactgtggtccattttcaaacaaagaatcatttcacatattgaggaaacaatatatgaatagcctgtctggcttagataaagagtaaaggcaagagaccaggtgcggtggctcacgtctgtaattctggtcctttaggaggcagaggtgggcagattacctgaggtcagaagtttgagaccagcttgaccaacatgatgaaaccctgtctctactaaaactacaaagaagtagttgggtgtggtggcacatgcctgtaattgcagctattccagaggctgaggcaggagaatcacttgatcatgggaggcggaagttgcagtgagtggagatcacgtcactgcactccagcctgagcaacagagcaagacttcatctcaaaaaaaaaagtaaagacaagaataagtatcacccatatggcatgaccaaagtttttggtaaacctagggttttttttctgttgtcagtaataaaattgcccttaaaaactagtttttatttctcattcctgaactcatttacatataatgtcgaagtatgataaattcaaactatgctgacacctgtacgaatgtggcttagtatgatataaagtctttatactttcaccaacttcaaacctcagtttctactgttataaagttcatttcactctctcttgtgaccatttaaatactttcacatatttcatcgcatttttcatcttctagggctgaggactcctaattcttaagaatatttctgttatccctataattactgtcgtgtctctccaggcattcttttttagtgaacagttgtcattaatcacttccagaaaggattcaaacaccatctctacatttatccttccaagtgctgtgactattgccttgcgaactacattttccaggctcccttgcagctaaggtgcagatctgtattcagccaagtatttgattgggagatgagccatatgaggaacaggttaggcaggggcatcccttttcttggtttaggggcagtggaggccatgtggtctgggttaggcagcaacagcatcttcttgattgggccaggagcagtaacttcctgtttgggcccatttggctgcatattctgttgctggcagcactggaggcagctggcatagggataggactgcagccttcttatgaggctgatggatgggtggttctgggcatcactcctggaagtcgagcctagaatctttttctccagtctgcccaatgattctatgagccttctgcctccccaaatcctgatctgcttacactaggtaaagcgatttcctttctttcttgtcccttagcacacagatatctcacagtgtttagtctgagacccaccacagctttcattccagcatcctttaagctgagtatcagacctggttcactttttcactgcagtacacttggctcattccaatgaggatgacttcatgtttatagtgatttctggttcctttgcttggaaatcctaaaagatagaaaagagtctccagttgctgcagacgcaggcatgagatataccgaaaactctccaaaattgtctcttggaatgtttcttcattacttcactaggtttctttctaaccttcagagctagtaaggaccttggattaaaagggccattgaatttctagtttagttaagaaatattttcctcatttcatgggaggggggaagcagtgcagactaaactcagagcccacatcatgttgttcttaccagttcaaatcaaatcacggtttccagtcacttggctaatatttatccttctttaaatcttgatgaaatgtctcttcctcaatgaacacttctctgcccctcaacctaaatttgttcccctcgtgttactgttttaaagaaccctgtaatttctatgtatttctgtgtgattatttgtataatatctgtccttcctattaacctctaagttccactaaatgctctgtgttcagaatagtgcctggcacaaaggagtatgacaaatagtgatgagtgaatgaatctgagccatcagacatgtatcttactttgtgctgggctgtccctcaagtgtagatgttcctagtgacaatcccattaattcaaacactgactggagaggattgaaaacatatgaagcagtgcttttggaactgaggctgtagtccaatatgactggagataaaaaatgaagactttaaaaacagaattcacataaaagcaggtatcaacatggaaaactgcagaggatgcctgtatacacagtgggcacagcagcagcattagaccaatcacctccaaacttgaggttccaggctgaggtgacagatcagagtgaaccaggcaccgtagaacaatgggaacacttagattcctgacactggaatttgctgattcttctactaacgtgtagcaagaaatttagccttacccaaagtcaggtctggtctttgtcccagttcctgggagataacctctgaaggctcggaatttcctgaattgttggcatgtctttataattgatggtggggtccttggaccacacttaatagtttctgctatcaagatgactcattgtgaggctggccacaatcaatggtctcaggatgggggctggccatgccagaaagaccaaccatataacatagggtggagggtttgtgtcacaacctagagagtgagttcaaccacacaggctatcagtcatctgatataatgaagccccaataaaaactctggacaccaaagctcagctgagttttccagactggcaatattccatgggtattgtcacgccttgatgctgggagggtaactcatccctgaggacagtggaagtttcacgtttggaaccctaccagactctgccctatgcatctcatcccttggctgcttttaatgtatcctttctctgtaataaacgaatcacaagtatactaggtttcaatgagttctatgagtctttctagtgaattatggaacctgatttaggaaatacccaaccttgccattggtgccagtagtgagagtggtcttgcatgaacttatctcccctttgtagttgagtcctagcgacttacagttgggggcagaagtcttatgtagatttagtctggaggtctatgaccttaaccttgcagtttggctaactctgggtagctacattttgtattgagcaactctatatgaataaaagaagttttgttcatataatgccttaacagtgaatcaagtatatcaagaaagttttttaaaagttaaaagtaggcaagtctactggtaataaagtaggcaagtcacaaggtaattaaatgcctacgtttcaatgattacacatgttgcttagaacatacacatatatgagatcatcacgttaaaatatttctaacacacaggctggcaacacctaacaataataataattagtaattgtctagttcttactactaactggtttctgttctgagtgttctacatatattaactaatttaattctcataagaactctggttattagccaggtttgtagaagctgaggcacaaggaggttaaatacttcgccctatggcacactcccaaaatttgaatccaaaccatccaactccatagctcatgctcttaaccaatgccccatacagcttctcagaaggcaatcacttgaaatttctctctgatcttatagaaaggtgttagtagactggttatcttaacgtccaatcccaatcatctttgtagcaaagtaatatttttatatgaacatgtcagaggcatttgaaccagagcaactccatcttgaataggggctgggtaaaatgaggctgaggcctactgggctgcattcccaggaggctaatgcattcttggtcacaggatgagataggaggttgacacaagatacaggtaataaagaccttgctgataaaacaggttgcagtaaagaagcctgctaaaatccaccaaaaccaagatggcgacaagagtgacctctggtcatccttattgctacactcccaccagtgccacgacagtttacaaataccatggcaatgtcaggaagttaccctatctaaaaaggggaggcatgaataatctaccccttgtttagcatataatcaagaaataaccataaaaatgggcaatcagcagccctcaaggatgctctgtctatggagtagccatacttttattcctctagtttcttaataaactttctttcactttactatatggactcaccctgaattctttcttgcgtgagatccaagaaccctctcttagggtctggattgggacccctttccagcaacaaagagatgtgtattttatttctgaaaatacttttttgctttgttatcattctcatgttaggccagcagctcaggaagtcctggtctccttcctatattggaaaagggagttcacaatgaacacaaaagaagaaaggataaatttgaaaattcctctggagacaatagaatggaaaaaaggggttttgagtttgggttacgacttttgagtttaaaaataaatctatgcctcaaaaagttctcttagaatatatctgaatacaaaaaccaattatgcaaccctagatttaatgcaaatttcttagtttctgggaatttctggggtgatggagacaaaagcaagaaagtaagacatcagtgaagatctctgcccatctccacataccctcccagcagtggggtgggaggaggcaatttttagcccccaaataggatgttaggaatctgaaactagaggagattgacaactaattcctctcagaaagactgagtgacagtatcctgcaaatttccaccagggcagagacagctgtgcagtagtgccaataggcccagagagcccaagacagccccattctgccagactggaattagagtagttgaatttttgcatgcacacaaaaagcatagaaattaacagagagagacttagtggacctggatgggtgtcaatattataataaaaaggatgcagagcatatagattaacagccagagacctacagggactcagacatcaggacattagaaacaataatgtcccagactggaccctaagcactgcaccccaacagatgccagtatgggccaggtgtccccaaccaatgccagaccaccagttaaggcctctacattccaccccaaggatggcgaggaggaaatctgaactgatggaagacatcctgaattgacttagaaagtcatgattttactgagaaaaccctgtatttacttaaagcaagctttctgacaccacgcaaagtggttaccagagttagaaattaggctgttatagaaaataaagctatcctggattgaacatctgagtaaattacaaaacatttacccgctacatctctattcaccagatagcgaactcaagcattcctctgcccctacataaatgacaaatgacattcacgtgtattacatatcccctcaggcctaactagggctgtgtgctgtttccaagaccaaaatgtcacaactgtaaaccactcacctggatacttgctataagaaatagcttggattagtatggaacttggtgtaaccctcaaatatgggagtttgtcactagaggtaccagaggaccacattctctgttaggggacctcgatgacagtatattacaatgaaggcagtgactggcaaacagcagcttcaaataggcatgcaaacaaacattgagaaacagtaagcacataagataactcatttagacacttttatatgcagcatgtataggatttaaaataacattcccaagttaaactgaaaccattactatgtaaatgccacagccaagtcaaatgaaatagtaaataccagccttgcaaattggtctccctcaagggcactcaaaagagttagactgcgtgctgctgccttaggaaatgtcctcctctctatcaatcatttctgctttgacatcaaacccattgaccagcatatgttttggaatttctgaacaactgactttcaaggattcacattcattctgcactttcttagaaacctcacaggagccactgttgccaataaaataaaataaaaaaacacaaacattataaatctaaccccaaaatgggattgcttcaaaagagaatggacaccccactccctacattgcttgtacacatctgtgttgattctcttggtgaactggcccatgcaagcaggagctcatcaatcagcagttgtcaccaagtgcaagtcagaattgctcaacagaaaaattgagtctttttttattccctattgtcacctactaaaatgtaagttgcttgttgatctcatcacactgagctatgtttcagggaagtgttgaaaaggcccagcctgcgcatattcttgaaattttgaaataatggctcagtgaacagatgtatactttctcccaatggctctttgtggaaatgaattttttatgagcccaaagtatctttgattcatccctgattaaaagtcaggttaaaactaaataccatatactttttgaaagacattttaggaagttattgacacaaggacttttgagactgaaaatcatgggttaacaataaacctttgtttggtgaaacaaaagaacagtacaggacagaggtgaaaagcacaggctccagggccagagtccctgggctcagattcttcacatttcagctctgtaaccttgaacaaactactccagttaatcataacttcagtcttttttaaaaaatgggatattaaataatgggtattaaataatagggttgccatagaggaaaatataaggtaatatttatatgcacataaaacagtgcctggcacagagccagtgttcaattagtactagctattttttggatacatgtagataaaagaagcatttaatgaatagttacatgcccattaacataaaatgtaagccacttccatattctgtagcttatggtgacaaagttttctgctcacgtattaactaaaaggagcgaagagcttccctataatattgaaaattttatcctaatggttccaaaggactgttttctaggaatgtttgctacagaaacctcactggttagatgtttgttggagcacactgtgattattcattgtcactgcaaactgtgtttaccacgggaggctgttctgactcaccactttgtgactcaccgattagtaaacagctaaatgtcgcattgctgatttaggtgtaatttactgcgtcaatataaaaggactctgcagattctactaaaatcaagaacatagctaaaggcattcttcatcgtaaaaacgaattttagaaaacaagatgactctaacagagttactttaaaatacaatgcaatatgtctattttaaatgacaacaatatctcctgtctgacagcattcaacttactttcagatttattcggtgttttctcaacttcacgagaaattgaaaatccataaaggagggaaatatgtcttgtttcattttcaatagttatatcaagaatacttttcaaaagtatttcatatttaccatgttttcagcaagtaactcttaacaatactctgagagtatgatcgtgatgataggtaaaaatcaggatcactcccttttcatctttacctgtgtagagcaatgtaatgtgcccttttcccaaaccctctgactccatgagggatgagacacagagggtgtggctgagggctcctaggaccgggactccttggctgatgtcctgtggcctgcagtccagggcttgcaggtgatcaaacaggaaaggagaaatgagggaggcacagtgctacgagcaggcctgtgttttcactgggaatggtggttagcagatgctcagatgtgtctcttctccctcacactcacctttggcttggctcttaactcctgcccacccctccctaaactctctgtggaggtccggaactaagcgagtcacagacacccagcaagcagtctccagagaggcctctgtgcatgaagacttccccagaaggatgcccactcttcctacctggcctgggaactcaaaatggacacaaaaactgaagactgtgagagagggtcagcttacaggccagaaactgacaataagattgatgttcaaatagctgaattattgattcttatcctgagatccactcctcattttcagtcttgcgataaaccttagtgaggggtgttttgtcttgtgttctatctattggtggatggattccaacttttctgaatatggggacgtaatttttaaagccaaaaattttgcagatagtaatggatttttaacatccattgattaacaaagtactatgaaaacagtaacacttttaaataaatttgctttcagtttttttaactaaacataatacatgcatgtatatatttaaacttatcacactgcctggcacagtgaaagcactcaaaaaatattagctataattactcctattgctgttgtttactcaatcataggtaatgcctggtatacatgtggattcttagagtccttatagaacacagcagcacataaactatactaggctctaaatcttctctcccaagaacttcatctgatgcatatttcaccagcaacagcagcatttagcactgtcttgctgtagaaaaattcttgataaattaattgaattaaatttatgtcacataaaatgtcatgaagagatggaagtgtcttggtcctgtatcttagcattttcaaacctctccattgtttttttttaatgtatagatttcacctgtgtaaaaattaaaaataagaaaactgatcctaatgctcttcatgaaaggcaagaaaagccttcttggaaagcaatagttatgggagagttctgccagaatttgttctcagaatgacatgagaacaattttattctaggaaatagaggtgctgaggactcagcttctgacctaccctagatcataaacatcactgcactaacagccaattaagaataatctaagctcttgtccttttataacagacctggttatgtcctaaaaaataagagcatttataaataaagaagaaagtttaacagttcaatagatcaacgtgactttccagctcctctctgaacaggtgacatctatttccccatcccttgaatctcagttggccttgtaacttatgtggatcaatagaatgtggccgaagtgacagctgtgcaagttctgagccctcacctcaagagcctttgcactctgtcacctgctctctcagacctcggcttttttccacgtgaataaaccgaggctaaccttctggaagaaaagagaccatatgaaacagaaccacatcagcctgaggccctggacatgtgcgaaaactgaagatcagcaaagctgacctgaaactgagtcacagttgacctcagatgcatgagaatctaaccaaggctgaaaacatttggttgaatcccacctcaatttctgacccagagatagcaactaatgtacaatatcatgattgttatgcagtcattagaaagaatatattagataaatgtgtattggcctggaaaaggtatcatctaagtatgcttaatgattatccatcttaaaaaaaaaaatacagaaatagggttgtagaacaagggtcctggtcatactgagcttacacttctgttgatgaaataaaacacatatgagatgatgaggaaataattcaaccaacaagaaaatactttacaaccaagagacttattaaataaaatgggtgcaccttttataataccaataagtataatagtaccctaacacagtagacacatttctgttgtctgtagttatctttcagaaagccgtcttgggagaacctttaaatgacctcagagagcgaaggtttatgtaaataaagaattaagtcagtgtgggtagaggttcagcaccagggtgcaggaagttatgtgaagattgtggtatggggctcatgtctagaaacagagagtggccccatgtcagcctatgagggaggagccaggccccacctcaagggtctccttcaggaagatctctgtgggaaaggagcaggggttccaggttttcagcaaagcctgtgcttgggcaatccatcaacacggttagtccagggcccacatataacctctgacccttctcacatttattttctctgtctggtacttcctctaaggagcatcctgccactcaccagcccctaccaaacacacacacacacacacacacacacacacacactcatactctatttgctcataatctcataatcatccatcaggttttaactgagatagtacttcttctgggaactttctctggtgagagatcctcttatgtggctcttgacctaccaaaccagaagcagttgtgcaattagtgatcattattctcttatttattatagtatctccagcacttagcacaatatctgcagacagtgggcacgcactgaaaaaaaaatactttttgaatcaatgaattaaatagctagttttcattcaccctaagaaaataccaaacattggtcttaagaatgtcacaggcctgaaggtataaaggaggaagcaaggaaacaaaatcaacagacagagccttggcaaaatctgctgttcaccagtcctcccagcaaatccatttcccattctggggaagcaatgccaaacagctccaggaactctgtacatggtctgtcaagtatccaagacagaagggagacttttcaagagtggaagcccagcctgcttgctccagtctggactgtgctggtctgtattttcctagtcagggatggccccaacctgggactgtgtctcctctcaggctctgaggccttgggaatggaggaatgtcgtatctgccagtggtttaggtctgtattgtgaagaattaactttcccaaacagagatctggccttcaccctcagctgctgggtggtgattcctaggctcctggattgtcctgccagataggagaatctttgtttgcctgagggctttggccaccagtcagtctaataacgtgatatatgatggggctttggaacatgccatgtgaattctgacctctggaggaaccagagatcattagctagaacctccaggaggggctggaggttaaaggtcagccacgtgggcagcgtgtgataaagctccaggaaaaactctggacaccaaaggctcagttgagctcctatcttctgcaacactccatgagttctgtcacacaacatggctgggaggaggtaacacacccaggtctccctgggagaggacaaccagaagcttcatgtttagaaccctcccagatttcacccaatgcttctctccctttggttggttctgatttgtacccttttgctctaataaactatgatcatgatcactttcctgagttttgtgtgttgtttcatggaactatcaagcctgagggagcatgggaactcccagatttgtagccagctagccaggagtaaaggcagcctggggacccggaacttgtggctgatgtttgcattgagggcagtcctgtggaggactgtgcccttaacctgtgaagcatggccacctcccggcagttgctgtgagaactcattgcagggccactcagggaagtgtgggaaattgaaccaatgatgcctgacaccacggcttcctgactatcctctaggaagtctatcaggagatgcccctgttcacttccctgtaggttccagcgaggctcagagggtcatcagttctaccaacaatatctgcgcagaagagagtagctgtgattttattttagtctgaaagaacactgtttgttgttgattaacacctaaatattacaaacagtctctcagtgtgagaagatttatcttattctcctgtgtaattagaatgattattcaacaaatggatgttatctagcgaacttccagaaagaagccaaatttatcaacctcaccaactcacacatacagccagggatctatattcttgtgctctcagagaaggcatggagcttggactgacagcaaaagaccaacaaaacacccagaagccagtcaaaaatggcccaggctgcaggatccttgaaagacctgaaaacacacgaggaaaaggctgggaaatagtaatggtgagtggacctctgcggtctggagaggaaactactggttattttaggaaaaacattcccataatggggctcagggaaaaaagaaagtaatggtatccaggccttattctcagaagcattctcctccctgaatccagtatctgaggtaactgagcagcagataaaaatagcattttctcgaaacaaagcaaaacattaaaaaaaaaatagcctactgtctaagctt

SEQ ID NO: 22666 - DNA, 135556 bp, Homo Sapiens
aagcttctgttctcccacactaccctcacctttcttctaggactcctagtaggaggatgctaagtttggttctctatctgtattgtgggtgagaggggctgtttgtttgttttagagacagggtcttgctctgttgcccaggctagagtggagtaacatgatcatatctcactgtatcctcaaactcctgggctcaagtatttgacctgcataataaatgtctacgcctcatgccactaggtggcaatgtgggtgttatactgaaaagatcacagatggttcactttgcaagtaaaactgtaaatgttcttaagtgtgcatttctgctgcttctgatgggctgaaaatcccctttgatttctaaagtaaatgtagagacgttttaaaaataaaggactcctttgtccaagatatattccgaaatcctccaacagagacctgtgtgagcttctgctgcagtaataatggtgaagatccggcaatttttgttggctattttgtggcttcagctaagctgtaagttggggagtttcaggacatgagatatttttcaaaattctggggaggggagagaagggactccaagtggctaatctggaggccctcctgaaaatgtgtaaagaaatgtgtataaatattgcaataattgtaatattctgtatctgatgatgtctttgagaacaggtgtaagtgccgccaaaaatgaagtggagcagagtcctcagaacctgactgcccaggaaggagaatttatcacaatcaactgcagttactcggtaggaataagtgccttacactggctgcaacagcatccaggaggaggcattgtttccttgtttatgctgagctcagggaagaagaagcatggaagattaattgccacaataaacatacaggaaaagcacagctccctgcacatcacagcctcccatcccagagactctgccgtctacatctgtgctgtcagacacagtgctccccaggcacctggagcccgtacctaaactctaaagttgaggcatcatttcttactcctgtctttcagacttgtctgtctctatccttggtcagatgatgtaaaatgtttaagtttttaaaatataatattctccccttctagaccatctctcttctctacaacatcatcaccaattatgttaaccagacagtatgtgatttttatcttgaaagtaaaatatacagggtataaaaatcccgattctgctacttattaactggatgatcttgacaaagttacttaacttctctgtgcttcagttttccctcagctataaaaaggaaacagtgttagccatggtacgtaaccccaattgtggggattacatgaggtaatatacacaaagggcttgacacatttcctggcacgtagtgttacataaggggtatcaattattagtattagttttagatgtaccatgagtttgctaatattcactatggattaataccacagatcattggagaagtatgtggaatataaataataagcaccttataataattttagtttttagattctttcctaatgatgtccagcacttggcctttttaatagtgttaagaaaaacagggagtagctgtagaaaacgtaatagaaggatgactctatggtttggtttgtggtgtggaaatgaaagactggtaagagatgtttctgaggaagctcagctgcttctttggaaaaaaggacaggttctaagttttcatgtggagatctctaatggaaacttgcatttgtggaaattcatgaagcaaaatatcaaacccagtgtatctaaatcaacggttctgtatatcccccaaggattctttacattactattcccaatcccagtggaattcttatatcaaaacaagttttatgattataattgttcttattactcaacaacatcaatcacatatattaaattacagctacattcttttttaaaatcaaaggctttttaaatcaaaatactacctgcacatatctaaaaagccaatagtattataaaggtctgttccttccttagcccatcaagaaaacagaaataccatgctctacccccaccttccaattcaaatccattctagcaatttctaattaatatgtatatactcttgatttatcattattaagcattatctattgacttccttctatggcagcatgcaaatactctcactttctcaacatagttatatatatatcataagctggggttaaatagacagtcagtgcatatatgattatgaccacatgaatattgccactgtccaaccaaaatgacaactatgagtatatatcctttctggtacaacgtattttcttagttaataattacatttttttcatttattctatgtcaatgtgctattttttctaagttcttcaacacagtcttaaaaatatttattaataatttctctcaaatgcttcaagcaccttaatttcttttttttcccctcaagattccctttcctttgacctccattgtttctctgtgtgaactgattgctctataagcataaatgtgattctagacattttagtaccactctcccaagttggcattcttgcattttggatctcatatcttcatttcccaaagacaaatactagagagaaaaaagggagaggaagaagaaggagaaagagaaaggagaaagaaacactcttgggctcacttttgaacaatgagagaaacaaatgaataaatggttcctgccctcccccatgccctgcaggaggaaaagtctgcggcatattccaaaagactcttcagaaggtcatgccaggatcaggcaccagtcatgcacatggtggccagctccattatgcaccattgcattggctctctccactacccaaatttgctctcttgatccctcactcctgctccatgagatcagttcccaaaaatgccctgcatgcaaacctttatctcagtctcagcttttaagggaatgtaagctaagacatgccttttctccctgtgaatagagaggacacggagccagaagacacaaccctgcccgtctgctctcagtagtgcctcatccccttcaaaagccctagatactggcctatgcagctgtcccagggactactgaccacagcttctctatcggtgatacatgttcctggcttcctgtttttaagaagtactggacacacctgtgtcactttcctgaaagaaagagtgctgagattggagggtccaagtggaattacaggctgagacagagagaagatacaggagatgctggccctaacagagagggaaaacaaaacaaaacaaaacaagaaactattcttatgaaataaaataaaaagtctccccatctgagagtccactggtctttcctgaaagccaagtcatttttccatcgaataaatgcacgagtaaaaatcaagaaaacataaacatggataaaagtttcctcatagagttgacaagattattcacagagacagacttcttggtctcaattttctcagcatcctcagagtttactgtgtggacactatgatcacagaaagaatctcaggtgccaaagctagcaattcaagttgtttctggtggaagtcagtgccctcctgtagtcaaatgaatgaactagtagaaaccactgctttggtcagtttcccctctcctgtatctggccttcagcacctcagtagatgcttagagagcacttaccaggcaccagctcccagttgatatgggaaccattagaactctctccagagaaactcagtctggcccagtgtttctgacttcaagcctcatttccatgaatcaggtagctggtgaaattgatagactgcaaactccatgagggcaggaaccatgccttggtcattacagtgtccccagtacttagcatagtgcctggagccaggagcgttctcaatgatctacgctgctttgtcatctgctctgataatgagagtttcttgatgtcaagggctgtgttttgttcatttttgtatccacaaagggattagcactgtatttaacaatagtagaaactgaagaaaaaaaaattgtgtggaattacatttcctctttttcatcagaagtgacttagtcttgctgactttctttctatgcccttgtgtgttgcctctttgtttgcttacttgatttttttgcctcactgagaatgtaaggtctgtgaggacatcggcttgtgtttcttcatccctgatatttcttttgcaaccagcccaattctgatatctagaaggaggtcaagaagtggtttttggaagaataagtgaatgtaatagttatttcggacttgtgttaaaaggcctctttgcacgatttagtagaaaaagcactggagtcttagtcccggttttgcagctaacagggtaatgtaattctgaagtcacatccccactttcggcttcagtttataacctggaaaattaggataataatacacactctacctttatcaaaaaaaatcacgatctaatctgaattagatcatgaaaatgaataccttttaaaaagtgaaaaattttaaacaaacaaaaattaatattattaaggaattttatatatatatatggaattaaatggacaagaaatattatcctaatatactccaagacaatagttttcactcccatacttatccgcactgctatacaattcagtcagtgccaaatcactacccacacacctggttgtccttattactgtggctttgcaaccttcccatcactcagcttatctaaatattctcctgtatctaaaaccagtttttagaatctccaaagagcttgttttccaacatcccccagaaacatgcatttctcaccttactgagccaaactattccccagtgttcatcctctctccaagaaaagtttttattcatttggtcattggtcaacatttttctcagctgtctatttctcaaaatgtatgttctattctactattttcttaaactaatgctattttcaccactggccaaactttgtatttgaatttgaatcttatttgaattttacattctactttggccatatctttgtaatcagaaataccagtgatagtactcaccattcggtgtacaaagtatataaaatagacatgctccatatctattaagtgatgaaaattttctaggtgattttattataaaattaaacatttttagaagaaaatgcttctttagtagattgagaagaaaatattccaggcaatgaccaacccagtgatgtcatcttactgtatatataaatattcatacttgattactactataatcaactacaatgtaaacatttcttttgaagtgctaatcggtatgaaatattctcttcaacctcagattaaatattcaccctcagtccccctcatttcccctgaaatacaatgacattaaattgcctgatctttgcattttctgatttattttatttttatttattttcctttgaggtgggctgggtacttgcaatggctaatagtgcagagctgcaattctaggcactatcagcaggtgttttaactaacacattatgtggattatttaaaaacttaatttaaggtatatgataatatagtactgctttgtatttttacaaactcatatttttttttttttttttttttgagacggagtctcgctctgtcgcccaggctggagtgcagtggcgggatctcggctcactgcaagctccgcctcccgggttcacgccattctcctgcctcagcctcccaagtagttgggactacaggcgcccgccactacgcccggctaattttttgtatttttagtagagacggggtttcaccgttttagccgggatggtctcgatctcctgacctcgtgatctgcccgcctcggcctcccaaagtgctgggattacaggcgtgagccaccgcgcccggcctacaagctcatattttaaagctccattcttagctcagagctgagccattaaagttcaataatgtaagacagcaagaatgctaaagcttgatgctaaacctattcagtaatatggaacagcatttgagatcaggaaggaggtggtcccacaactgggaattaaaatcaaaatggatttgagcagataaagctgcatgtccaaaggaagttggtgggaaaacttgaatctgccaggaattttctgctagatttactgcagatcctgccagattcaagccaagcatagaaaaataagcagaaaacctccttcatcactgcctgtgaaagaatgttgagtccaagagacgagtagagaaagacctctatagattaggacccattaatatacactgacttggcaaaccgagacctagaggcaagtacagaccacaggaccaccagatgatttactaccttggatcctactggtggcaaaagctgctcccagggtccacttccctgtacagaaaactacctcatagaaactgaaaattatatggcaatatacatcaaagagtccttgcactctgaccctgtaatttcacttctagaaatttcttctttcttaaaaaaacaatcaagtatgtacaaagattcattttttaaatgttggtgagagctttatttaaatgagtggagaaggaaaagaaaccccaatgtctcacaaaggagttgatttaaaaactgggggcacattggatataaccaataaaaatcattttatctaaacttctgcttccagccacgccgaaataacagggaccagatttaccattccacttgaaacaacagcaactgagaaggctgcagacaaatgacataaatcaacaatttccaaaacacggtatactaagcaataaatgaccatgatcctgagagatgggaaacaaatgaggcgagccctaacattgcaatagcttattgccttgagagagtttctaggccacagcacaaagaggggaaactgaggcagaacctggtaggctccctgaattgaggcaacagatctgagacagagaagactaaggcagctgaagttcataagacagaatacacgagaggagagaggggcacagagaggacctagagatctgccgagggtgccctcaagtattcagcagaatgctcatctgcgcacgcatgtggaatctacccgagggtgggtggcggcagcagggaataaccattcaaaaagattaaaggaaagaggacctcttcaagtatgtctagaatttagaaaagagtttattgcttagccatatatttcttaattctttaattaatatttcatacatttcattttctctggctctagtcacttatcactgtggtccattttcaaacaaagaatcatttcacatattgaggaaacaatatatgaatagcctgtctggcttagataaagagtaaaggcaagagaccaggtgcggtggctcacgtctgtaattctggtcctttaggaggcagaggtgggcagattacctgaggtcagaagtttgagaccagcttgaccaacatgatgaaaccctgtctctactaaaactacaaagaagtagttgggtgtggtggcacatgcctgtaattgcagctattccagaggctgaggcaggagaatcacttgatcatgggaggcggaagttgcagtgagtggagatcacgtcactgcactccagcctgagcaacagagcaagacttcatctcaaaaaaaaaagtaaagacaagaataagtatcacccatatggcatgaccaaagtttttggtaaacctagggttttttttctgttgtcagtaataaaattgcccttaaaaactagtttttatttctcattcctgaactcatttacatataatgtcgaagtatgataaattcaaactatgctgacacctgtacgaatgtggcttagtatgatataaagtctttatactttcaccaacttcaaacctcagtttctactgttataaagttcatttcactctctcttgtgaccatttaaatactttcacatatttcatcgcatttttcatcttctagggctgaggactcctaattcttaagaatatttctgttatccctataattactgtcgtgtctctccaggcattcttttttagtgaacagttgtcattaatcacttccagaaaggattcaaacaccatctctacatttatccttccaagtgctgtgactattgccttgcgaactacattttccaggctcccttgcagctaaggtgcagatctgtattcagccaagtatttgattgggagatgagccatatgaggaacaggttaggcaggggcatcccttttcttggtttaggggcagtggaggccatgtggtctgggttaggcagcaacagcatcttcttgattgggccaggagcagtaacttcctgtttgggcccatttggctgcatattctgttgctggcagcactggaggcagctggcatagggataggactgcagccttcttatgaggctgatggatgggtggttctgggcatcactcctggaagtcgagcctagaatctttttctccagtctgcccaatgattctatgagccttctgcctccccaaatcctgatctgcttacactaggtaaagcgatttcctttctttcttgtcccttagcacacagatatctcacagtgtttagtctgagacccaccacagctttcattccagcatcctttaagctgagtatcagacctggttcactttttcactgcagtacacttggctcattccaatgaggatgacttcatgtttatagtgatttctggttcctttgcttggaaatcctaaaagatagaaaagagtctccagttgctgcagacgcaggcatgagatataccgaaaactctccaaaattgtctcttggaatgtttcttcattacttcactaggtttctttctaaccttcagagctagtaaggaccttggattaaaagggccattgaatttctagtttagttaagaaatattttcctcatttcatgggaggggggaagcagtgcagactaaactcagagcccacatcatgttgttcttaccagttcaaatcaaatcacggtttccagtcacttggctaatatttatccttctttaaatcttgatgaaatgtctcttcctcaatgaacacttctctgcccctcaacctaaatttgttcccctcgtgttactgttttaaagaaccctgtaatttctatgtatttctgtgtgattatttgtataatatctgtccttcctattaacctctaagttccactaaatgctctgtgttcagaatagtgcctggcacaaaggagtatgacaaatagtgatgagtgaatgaatctgagccatcagacatgtatcttactttgtgctgggctgtccctcaagtgtagatgttcctagtgacaatcccattaattcaaacactgactggagaggattgaaaacatatgaagcagtgcttttggaactgaggctgtagtccaatatgactggagataaaaaatgaagactttaaaaacagaattcacataaaagcaggtatcaacatggaaaactgcagaggatgcctgtatacacagtgggcacagcagcagcattagaccaatcacctccaaacttgaggttccaggctgaggtgacagatcagagtgaaccaggcaccgtagaacaatgggaacacttagattcctgacactggaatttgctgattcttctactaacgtgtagcaagaaatttagccttacccaaagtcaggtctggtctttgtcccagttcctgggagataacctctgaaggctcggaatttcctgaattgttggcatgtctttataattgatggtggggtccttggaccacacttaatagtttctgctatcaagatgactcattgtgaggctggccacaatcaatggtctcaggatgggggctggccatgccagaaagaccaaccatataacatagggtggagggtttgtgtcacaacctagagagtgagttcaaccacacaggctatcagtcatctgatataatgaagccccaataaaaactctggacaccaaagctcagctgagttttccagactggcaatattccatgggtattgtcacgccttgatgctgggagggtaactcatccctgaggacagtggaagtttcacgtttggaaccctaccagactctgccctatgcatctcatcccttggctgcttttaatgtatcctttctctgtaataaacgaatcacaagtatactaggtttcaatgagttctatgagtctttctagtgaattatggaacctgatttaggaaatacccaaccttgccattggtgccagtagtgagagtggtcttgcatgaacttatctcccctttgtagttgagtcctagcgacttacagttgggggcagaagtcttatgtagatttagtctggaggtctatgaccttaaccttgcagtttggctaactctgggtagctacattttgtattgagcaactctatatgaataaaagaagttttgttcatataatgccttaacagtgaatcaagtatatcaagaaagttttttaaaagttaaaagtaggcaagtctactggtaataaagtaggcaagtcacaaggtaattaaatgcctacgtttcaatgattacacatgttgcttagaacatacacatatatgagatcatcacgttaaaatatttctaacacacaggctggcaacacctaacaataataataattagtaattgtctagttcttactactaactggtttctgttctgagtgttctacatatattaactaatttaattctcataagaactctggttattagccaggtttgtagaagctgaggcacaaggaggttaaatacttcgccctatggcacactcccaaaatttgaatccaaaccatccaactccatagctcatgctcttaaccaatgccccatacagcttctcagaaggcaatcacttgaaatttctctctgatcttatagaaaggtgttagtagactggttatcttaacgtccaatcccaatcatctttgtagcaaagtaatatttttatatgaacatgtcagaggcatttgaaccagagcaactccatcttgaataggggctgggtaaaatgaggctgaggcctactgggctgcattcccaggaggctaatgcattcttggtcacaggatgagataggaggttgacacaagatacaggtaataaagaccttgctgataaaacaggttgcagtaaagaagcctgctaaaatccaccaaaaccaagatggcgacaagagtgacctctggtcatccttattgctacactcccaccagtgccacgacagtttacaaataccatggcaatgtcaggaagttaccctatctaaaaaggggaggcatgaataatctaccccttgtttagcatataatcaagaaataaccataaaaatgggcaatcagcagccctcaaggatgctctgtctatggagtagccatacttttattcctctagtttcttaataaactttctttcactttactatatggactcaccctgaattctttcttgcgtgagatccaagaaccctctcttagggtctggattgggacccctttccagcaacaaagagatgtgtattttatttctgaaaatacttttttgctttgttatcattctcatgttaggccagcagctcaggaagtcctggtctccttcctatattggaaaagggagttcacaatgaacacaaaagaagaaaggataaatttgaaaattcctctggagacaatagaatggaaaaaaggggttttgagtttgggttacgacttttgagtttaaaaataaatctatgcctcaaaaagttctcttagaatatatctgaatacaaaaaccaattatgcaaccctagatttaatgcaaatttcttagtttctgggaatttctggggtgatggagacaaaagcaagaaagtaagacatcagtgaagatctctgcccatctccacataccctcccagcagtggggtgggaggaggcaatttttagcccccaaataggatgttaggaatctgaaactagaggagattgacaactaattcctctcagaaagactgagtgacagtatcctgcaaatttccaccagggcagagacagctgtgcagtagtgccaataggcccagagagcccaagacagccccattctgccagactggaattagagtagttgaatttttgcatgcacacaaaaagcatagaaattaacagagagagacttagtggacctggatgggtgtcaatattataataaaaaggatgcagagcatatagattaacagccagagacctacagggactcagacatcaggacattagaaacaataatgtcccagactggaccctaagcactgcaccccaacagatgccagtatgggccaggtgtccccaaccaatgccagaccaccagttaaggcctctacattccaccccaaggatggcgaggaggaaatctgaactgatggaagacatcctgaattgacttagaaagtcatgattttactgagaaaaccctgtatttacttaaagcaagctttctgacaccacgcaaagtggttaccagagttagaaattaggctgttatagaaaataaagctatcctggattgaacatctgagtaaattacaaaacatttacccgctacatctctattcaccagatagcgaactcaagcattcctctgcccctacataaatgacaaatgacattcacgtgtattacatatcccctcaggcctaactagggctgtgtgctgtttccaagaccaaaatgtcacaactgtaaaccactcacctggatacttgctataagaaatagcttggattagtatggaacttggtgtaaccctcaaatatgggagtttgtcactagaggtaccagaggaccacattctctgttaggggacctcgatgacagtatattacaatgaaggcagtgactggcaaacagcagcttcaaataggcatgcaaacaaacattgagaaacagtaagcacataagataactcatttagacacttttatatgcagcatgtataggatttaaaataacattcccaagttaaactgaaaccattactatgtaaatgccacagccaagtcaaatgaaatagtaaataccagccttgcaaattggtctccctcaagggcactcaaaagagttagactgcgtgctgctgccttaggaaatgtcctcctctctatcaatcatttctgctttgacatcaaacccattgaccagcatatgttttggaatttctgaacaactgactttcaaggattcacattcattctgcactttcttagaaacctcacaggagccactgttgccaataaaataaaataaaaaaacacaaacattataaatctaaccccaaaatgggattgcttcaaaagagaatggacaccccactccctacattgcttgtacacatctgtgttgattctcttggtgaactggcccatgcaagcaggagctcatcaatcagcagttgtcaccaagtgcaagtcagaattgctcaacagaaaaattgagtctttttttattccctattgtcacctactaaaatgtaagttgcttgttgatctcatcacactgagctatgtttcagggaagtgttgaaaaggcccagcctgcgcatattcttgaaattttgaaataatggctcagtgaacagatgtatactttctcccaatggctctttgtggaaatgaattttttatgagcccaaagtatctttgattcatccctgattaaaagtcaggttaaaactaaataccatatactttttgaaagacattttaggaagttattgacacaaggacttttgagactgaaaatcatgggttaacaataaacctttgtttggtgaaacaaaagaacagtacaggacagaggtgaaaagcacaggctccagggccagagtccctgggctcagattcttcacatttcagctctgtaaccttgaacaaactactccagttaatcataacttcagtcttttttaaaaaatgggatattaaataatgggtattaaataatagggttgccatagaggaaaatataaggtaatatttatatgcacataaaacagtgcctggcacagagccagtgttcaattagtactagctattttttggatacatgtagataaaagaagcatttaatgaatagttacatgcccattaacataaaatgtaagccacttccatattctgtagcttatggtgacaaagttttctgctcacgtattaactaaaaggagcgaagagcttccctataatattgaaaattttatcctaatggttccaaaggactgttttctaggaatgtttgctacagaaacctcactggttagatgtttgttggagcacactgtgattattcattgtcactgcaaactgtgtttaccacgggaggctgttctgactcaccactttgtgactcaccgattagtaaacagctaaatgtcgcattgctgatttaggtgtaatttactgcgtcaatataaaaggactctgcagattctactaaaatcaagaacatagctaaaggcattcttcatcgtaaaaacgaattttagaaaacaagatgactctaacagagttactttaaaatacaatgcaatatgtctattttaaatgacaacaatatctcctgtctgacagcattcaacttactttcagatttattcggtgttttctcaacttcacgagaaattgaaaatccataaaggagggaaatatgtcttgtttcattttcaatagttatatcaagaatacttttcaaaagtatttcatatttaccatgttttcagcaagtaactcttaacaatactctgagagtatgatcgtgatgataggtaaaaatcaggatcactcccttttcatctttacctgtgtagagcaatgtaatgtgcccttttcccaaaccctctgactccatgagggatgagacacagagggtgtggctgagggctcctaggaccgggactccttggctgatgtcctgtggcctgcagtccagggcttgcaggtgatcaaacaggaaaggagaaatgagggaggcacagtgctacgagcaggcctgtgttttcactgggaatggtggttagcagatgctcagatgtgtctcttctccctcacactcacctttggcttggctcttaactcctgcccacccctccctaaactctctgtggaggtccggaactaagcgagtcacagacacccagcaagcagtctccagagaggcctctgtgcatgaagacttccccagaaggatgcccactcttcctacctggcctgggaactcaaaatggacacaaaaactgaagactgtgagagagggtcagcttacaggccagaaactgacaataagattgatgttcaaatagctgaattattgattcttatcctgagatccactcctcattttcagtcttgcgataaaccttagtgaggggtgttttgtcttgtgttctatctattggtggatggattccaacttttctgaatatggggacgtaatttttaaagccaaaaattttgcagatagtaatggatttttaacatccattgattaacaaagtactatgaaaacagtaacacttttaaataaatttgctttcagtttttttaactaaacataatacatgcatgtatatatttaaacttatcacactgcctggcacagtgaaagcactcaaaaaatattagctataattactcctattgctgttgtttactcaatcataggtaatgcctggtatacatgtggattcttagagtccttatagaacacagcagcacataaactatactaggctctaaatcttctctcccaagaacttcatctgatgcatatttcaccagcaacagcagcatttagcactgtcttgctgtagaaaaattcttgataaattaattgaattaaatttatgtcacataaaatgtcatgaagagatggaagtgtcttggtcctgtatcttagcattttcaaacctctccattgtttttttttaatgtatagatttcacctgtgtaaaaattaaaaataagaaaactgatcctaatgctcttcatgaaaggcaagaaaagccttcttggaaagcaatagttatgggagagttctgccagaatttgttctcagaatgacatgagaacaattttattctaggaaatagaggtgctgaggactcagcttctgacctaccctagatcataaacatcactgcactaacagccaattaagaataatctaagctcttgtccttttataacagacctggttatgtcctaaaaaataagagcatttataaataaagaagaaagtttaacagttcaatagatcaacgtgactttccagctcctctctgaacaggtgacatctatttccccatcccttgaatctcagttggccttgtaacttatgtggatcaatagaatgtggccgaagtgacagctgtgcaagttctgagccctcacctcaagagcctttgcactctgtcacctgctctctcagacctcggcttttttccacgtgaataaaccgaggctaaccttctggaagaaaagagaccatatgaaacagaaccacatcagcctgaggccctggacatgtgcgaaaactgaagatcagcaaagctgacctgaaactgagtcacagttgacctcagatgcatgagaatctaaccaaggctgaaaacatttggttgaatcccacctcaatttctgacccagagatagcaactaatgtacaatatcatgattgttatgcagtcattagaaagaatatattagataaatgtgtattggcctggaaaaggtatcatctaagtatgcttaatgattatccatcttaaaaaaaaaaatacagaaatagggttgtagaacaagggtcctggtcatactgagcttacacttctgttgatgaaataaaacacatatgagatgatgaggaaataattcaaccaacaagaaaatactttacaaccaagagacttattaaataaaatgggtgcaccttttataataccaataagtataatagtaccctaacacagtagacacatttctgttgtctgtagttatctttcagaaagccgtcttgggagaacctttaaatgacctcagagagcgaaggtttatgtaaataaagaattaagtcagtgtgggtagaggttcagcaccagggtgcaggaagttatgtgaagattgtggtatggggctcatgtctagaaacagagagtggccccatgtcagcctatgagggaggagccaggccccacctcaagggtctccttcaggaagatctctgtgggaaaggagcaggggttccaggttttcagcaaagcctgtgcttgggcaatccatcaacacggttagtccagggcccacatataacctctgacccttctcacatttattttctctgtctggtacttcctctaaggagcatcctgccactcaccagcccctaccaaacacacacacacacacacacacacacacacacactcatactctatttgctcataatctcataatcatccatcaggttttaactgagatagtacttcttctgggaactttctctggtgagagatcctcttatgtggctcttgacctaccaaaccagaagcagttgtgcaattagtgatcattattctcttatttattatagtatctccagcacttagcacaatatctgcagacagtgggcacgcactgaaaaaaaaatactttttgaatcaatgaattaaatagctagttttcattcaccctaagaaaataccaaacattggtcttaagaatgtcacaggcctgaaggtataaaggaggaagcaaggaaacaaaatcaacagacagagccttggcaaaatctgctgttcaccagtcctcccagcaaatccatttcccattctggggaagcaatgccaaacagctccaggaactctgtacatggtctgtcaagtatccaagacagaagggagacttttcaagagtggaagcccagcctgcttgctccagtctggactgtgctggtctgtattttcctagtcagggatggccccaacctgggactgtgtctcctctcaggctctgaggccttgggaatggaggaatgtcgtatctgccagtggtttaggtctgtattgtgaagaattaactttcccaaacagagatctggccttcaccctcagctgctgggtggtgattcctaggctcctggattgtcctgccagataggagaatctttgtttgcctgagggctttggccaccagtcagtctaataacgtgatatatgatggggctttggaacatgccatgtgaattctgacctctggaggaaccagagatcattagctagaacctccaggaggggctggaggttaaaggtcagccacgtgggcagcgtgtgataaagctccaggaaaaactctggacaccaaaggctcagttgagctcctatcttctgcaacactccatgagttctgtcacacaacatggctgggaggaggtaacacacccaggtctccctgggagaggacaaccagaagcttcatgtttagaaccctcccagatttcacccaatgcttctctccctttggttggttctgatttgtacccttttgctctaataaactatgatcatgatcactttcctgagttttgtgtgttgtttcatggaactatcaagcctgagggagcatgggaactcccagatttgtagccagctagccaggagtaaaggcagcctggggacccggaacttgtggctgatgtttgcattgagggcagtcctgtggaggactgtgcccttaacctgtgaagcatggccacctcccggcagttgctgtgagaactcattgcagggccactcagggaagtgtgggaaattgaaccaatgatgcctgacaccacggcttcctgactatcctctaggaagtctatcaggagatgcccctgttcacttccctgtaggttccagcgaggctcagagggtcatcagttctaccaacaatatctgcgcagaagagagtagctgtgattttattttagtctgaaagaacactgtttgttgttgattaacacctaaatattacaaacagtctctcagtgtgagaagatttatcttattctcctgtgtaattagaatgattattcaacaaatggatgttatctagcgaacttccagaaagaagccaaatttatcaacctcaccaactcacacatacagccagggatctatattcttgtgctctcagagaaggcatggagcttggactgacagcaaaagaccaacaaaacacccagaagccagtcaaaaatggcccaggctgcaggatccttgaaagacctgaaaacacacgaggaaaaggctgggaaatagtaatggtgagtggacctctgcggtctggagaggaaactactggttattttaggaaaaacattcccataatggggctcagggaaaaaagaaagtaatggtatccaggccttattctcagaagcattctcctccctgaatccagtatctgaggtaactgagcagcagataaaaatagcattttctcgaaacaaagcaaaacattaaaaaaaaaatagcctactgtctaagctttgtctcccagtggaactcaggaaccaagccagcttctccagctgtgcaccttggctgtgtgtctcagatggaacatttctgacttcattccctcctcctcccacgtcactcggtaaggagggtgggccaggacaagcagctcagacagctgttcctacagctggccttaccacaatcccccaggcctcacatacatgcacctctgggccctgcctgcctgcactaaaccatccggcccagtgcaacagaccattctttcaagctgtctctctcctactcacaaccatcccaggagtcctcttaaaactattttttcggagaacacattgtgctttgccacactgttccatttatctcttggtggccattccatttgcctcagcaactctctatcccattttttagtactacccctgaacgagaaggcaatcttgttcatcttgccaactctaaatccttatcgcaatcgtgttgctttagattgcattcatgtgtgaataggtgtggataggtgtttggcactgtgttagatgccaaagatacagtgctaaggaaaaaacatacctgacaacagattttattatattccaacgggaaagataggataaacagatacataaacaatgtatatgcagattaggatgagtatcatgaaagcaataaataagaggctgacgggttcaatttaagtggggtggccagaaaatgcttttccttcttctgagagaagtgagcgaggggcacagagaagtccgaattgttacactaatgaatatttctgagcttgaaaacacaaaacaaggggagatgaggttccactcaacagaggtatatacacatcaattacatgacccagaaaacctgattcagacacaccttgctgacactactccatagggaaggtcattttcacttgtccacatctaccacacctccattttcactctccctgagataaaaggatgtgcatttacactgtgtctgcctagcgaaattgtaccccccgctgaataaagcacagttagttgagattcacgaacaccaagcctctctttataatgactttagagagctgtgctaactgaccagcactctggatacttatgagcagatgtctggtagcaatggaacctctcatgaccacccaggctctaaatgactgttcagctcagcagctcattatcaccttcctggagttagagctccaacataagaataaatatctccatctagtattatcactttttaaatcaaaatctatattcagcttgagagtataaatatcaaaatttcagggcattttttctaacttttcttgggagattttagtaaaattccagggcagattgctgaaagtacaatctgggaacagaaactaatatagtgtcacatcatatgaagttaacctctttttcttatgcaattctatcaaacttcaaggaaattctttggaaatctgagccccactacatttaaaacaaaataggtctatcatgaaatgcctaataaaggttgatcttacagtgtgatcgaggtgctatgcagatctgagacaggtggattattccagaatgagaaagaaacacaggatgaataagtcgcactaatggcaatagcaacttctgggaaacaccaatttctggcagctgttgctttcgtcaacactttctcagcaaaattgccacagccatttctgagagcttagaagcactgctaggaatctctaataggagtctgtttaatgggaattcctattgactacagccgcttttgcatataggagataatgttgagctaagggaatctttcaatgattcattcaaaacatgtttatccaccatgtgataaacattatagtcagtgccatagtataaacttgaataatgcataatccctgcccccagggaactcacatccttctcgacatgcctagcacaaacacacagaattataataaaagttgtcaagaagaagatatgggtggcgcattatgcaagcagagaaaaagggactgccttattcatttagaagctactggccctctctagagattgttggtcttccagtacatctaaatattcttcaatcgtaaaatgccatgaagctagaagtacaaaatgctgtattatcagttaagccccctatttttttctttttttttttttttttgagacagagtctcattctgtcacccaggctggagtgcagtggcacgatctcacctcactgcaacctccacctcccaggttcaagcagttctcctgtcttagcctcccgagtagctaggtttacaggtgcatgccaccatacccagctaatttttgtatgattagtagagactgggtttcaccatgttggccaggctggtcttgaggtcttgaactcctgacctcaggtgatccgcccaccttggcctcccaaagtgctgggattatgggattacaggtgtgagccaccatgcccagccagttaagcctcttaaagaatgtcttgaattataacaaacacatgatgcctatcttcccccatatctttatactgacaaaattaggttcaaaatcaaggcatggtcaccagaaatcaggtcagagggatcaagaaaacatggacagtgaagtgatttcacttccatacaggtgataaatatttcctaaaatacaggtagatgtgtggcacaaaacctccagactctgagcatcaaagtccctcctaataccagaaaggaaggacccagcatttgtcatctcagtctcagacaaatacatactcagagggcctcaggaacatatgtaaactaaaaaaaaaaacatgagaaattgagcaggagcctgagtttgggcttccttgggtgggtactgtattaatttcccataacaaaatactatggaatagtacacagatgtttctttcctcacatttttggaggcaggaagtccatgattgaggtgtcagcaggcttggattctcctgaggcttctctccttggcttgtgaatggtcatcttctctctctctctcttcacttggtcttttctctgtgcacaggcatcctttgtatttctccctcttcttataaggacataaatcctactggattaggaccttacccttatgacctcatttaacctcagttaccactttaaaagccatatcttcaaatacagtcacattgggggctagggcttcagcatatgaattttaggaggacagaattcaatccataatagatggggacagggcaattctcttcctaggtaagccttcccttagggccatttacggggagataaacaaaccccaatttctactgagcaaaagctcagagaccctgaagtaactgcagttagtaaatgagaaagacagaatattttcaatatcttcaagtctaatacctagaagtgatagaggtttattcacattttctcccagtcattttcttattctgtgtttatacagcatttctgttaatgacaccattattttcagaaatcaaaatgaaatcttaatgttatcattgactctccccccttccttgccttcacttcaatcataattttccatgtctatgtaagtattcttttggctatttacatattcatcagaaacctatttcagctcttattaattttcatgaagatcactaatggaagccacctattgttcatgcttctagttcaggtgctcctaatatgggaactgtatagtttcagttgatctataacctttcaccccccaggttttgtggttgtttttatatacactttcacacatataagtggtaatgtgttcattgctattatcagttgttcaaagtgggtccctcacccacgaacaggttaaaagccagagctctcctctctcctactacacttgctccttgtaaaaaaaatttaatctttgtgattaacacaattgtttatattcttccccctactcaaatactcccagttacaaacattttaacttgtagtttaaaatcgttcctggtcagcaatcccttctgtagactcttccaaaaattaccatggttcttataatcaatctcacacccaaaagaggagattttagaaaggcatagacaccagaaggcagggatatatctgtctaccacagtccaccgtctggccaccaatgactcacattaccctcacttgcaaaaatacattcacatacatccccaaaggtctcaagaatcttatctcacagagcttcagctcaaagtcaaacttttatgctttaaatcatggctaagttcaaacacagctcctgggcataatatatgaagtacagctcctggggtataacttctctccttctgtcaacctgtaaaactaaagaggcaagtgatctgcccccagtacacccgtcatacaattttgaaacaggcataactggtaggcatgggataacagctatagacatattggttcaaagggaggaggggaaaaagataacaaagagtcgttggtccatagcagttctaaaatctagctgggcaaatgttgggagttcaatgattaggttttagagcctaagattaatctcggctattggggaaaccagcccccagtatttcaacgtaggttcttttctattttccctaagtgtcggccagtctgagaaataaagagaaagagaacaaaaaaaagaaattttacagctgggtctccggggttgacatcacatgtcggcaggttccatgatgccccctgagcctcaaaaccagcacgtttttattatggatttcaaaaggaggggggggtgtatgaatagggtgtgtgtcacagagatcacatatgatcacatgcttcaagggcaataaaatagcacaaggcaaatgggcaggacaaggtcacaaggccagggcaaaattagaattacagatgaggttccctgtcccactgtgcacgtattgtcattgataaacatcttaacaggaaacggggttcaagagcagagaacaggtctgactagaatttcatcaggctggaatttcccaatcctaacaagcctaggggcgctgcaggagaccagggcttatttcataccttatctacaactgcataagacagacactcccagagcagccattttagaggcctccccctgggagtgcattcttttcccagggctgttccttgctgagaaaaagaattcagtgatatttctcttatttgcttttgcaagaagagaaatatgactctgttccacctggccccgcaggcagtcagactttatggttatcttccttgtttcctgaaaatcactgttatcctgttccttttctaggtgcccagatttcatatttttcaaacacacatgctctacaaacaagctgggcagataacacaatcattacaggatcctgaggcgacatacatcctcagtttatgaagatgatgggattaagagattaaagtaaagacaggcataggaaattgtaagagtattgattggggaagtgaaaaatgtccttgaaattgtcaccatttatgttcttctgccatggcttcagccggtccctccgtctggggtccctgacttcccacaacacttggctctaccctcttgcctcttagcaccaccctctatcatccttcttctttaatgtttgcagttgagtagttttatcagcctgcttcctgccagtagaaatgttggggtctgacagcctcctttcatttcattttgtagtctttctatccctttcagtccaagccagtagtgtttctgctgaaataattttctcaagatctttgtgcatctaccatagatttcaatgatgttctgaccatcagaaaaaaacacacccacagatcttttccagacagcatatatttttggctcctgctcggatggctgaggggctacagtttgattgagtggatctaaaaggcacattcttaatctccttaaggagtcctttgtgccattgaatattctcaccttttagtctttgaggtttttttaacttttattttgagttcaggagtacatgtgtaggtttgttataaaggtaaacttgtgtcatggggtttgttgttcagattttttcatcacccaggtattaagcctgggtgtacacattagttatttttcacgatcctctccctcctctcaccctccaccctcaagtaggctccagtgtctgttgttcccctctatgtccatgtgttctgtgttatcatttcgctcccacatataagtgagaaaatgctgtatttggttttctctttctgtgttaatttgctaaggataatgacctccagcttcatcaatgtccctgcaaagggcatgatctcattattttttatggctgtatagtatttcatggtttatatctatcacattttctttatccaatctgccattcctggccatttaggttgattccatgtctttgctattgtgaatagtgctgcaatgaacatatgcatacatgtgtctttatgatagaacgattattattcctttgggtatatacccagtaatgggattgctaagtcaaatggtagttctgtttttaggtctttgaggaacagccatgctgttgctcctaatggttgaactaacttacactcccaccaacagtgtaagtgttcctttttctccacaacctcaccagcacattattttttgactttttaacaatagccattctgactggtgtgagatggtagctcattgtggtttttatttgcatttctctaataatcaggaatgttgagctttttttcatatgcttggtggctgtatgtgtgtcttcttttgaaaagtgtctgttcgtgtcctttgcccactttttaatggatttttttcttgtaaatttgtttaagttccttatagatgctgcatattagacctttgtcagatgcatagtttgcaaatattttctcccattctgtaagttgtctttttagtctgctgatagtttcttttgctgtgcagaagttctttagtttaattagatcccatttgtcaaattttgcttttgttgcaattgcttttgatgtctttgccataaaatctttgcctattcctatgtacagagtggtattgcctaggttgtcttccagggttttttttataattttgggtctttaatccagcttgagttgattttttttgtacatgatgtaaggaaggagtccagtttcaatcatctgtatatggctagccagttatcccagcaccatttattgaatagagagtcttccccattgcttgtttttgccagctttgttgaagatcaggtagttgtagccttatttctgggctctctattctgtttcattggtctatgtgtctgtttctgtaccagtaccacgctgtttttgttagtgtagccctgcagtatactttgaagtcaggtagcatgatgcctccagctttgttctttttgcttaggattgccttggctatttgggctctttttttttccatatcagttttaaaatagtttttctctaattctgtgaagagtgtcattggtagtttgataggaatagcattgaatctataaattgctttgggccgtatggccattttaacaatattgattcttcctgtccctgagcacgggatatttttccatttgtctgtgtcatctctcgtttctttgagcagtgttttgcagttctgcttggagagatctttcacctccctggttagttgcattcctaggtattttattctttttgtggccattgtgaatgggattgggttcctgatttggctctcagcttgactgttattgctgtatagaaatggcagtgatttttttatgttgattttgtatcctgagattttgctgaagttgtttatcagttgaaggagctttggggccaagtctatgggtttttctagatatagaatcatgtcgtctgcaaagaaggataatttgactttctctcttcctatttggatgcaatttaatactttctcttgcttgattgctctagcaatctctttggcctgaaagccccctgaggacaaatacatcagtcaactgtttctttgtttgttgtttgttgtttcttttaaattattctcattacttagcacagatcatgtacaccatgagtgtttaataatatcaatagaatatttgggagcaggaggttattttgcttagttttatgctttcactgttgttatagaacagctgggctagaagacattattaaacataaatacaactggtaaaatatcccagcagaagaaatgctttaaaaatatctccaatcactgcaggagtgcagagaggcaacaactcctccagcttttgcacatcgaataattggtttagttcactccttccacatcacttggagcagcggggagggtggggaaagcttaatgaccaggaaagcctttcataaagtcatcatcaatgttctttataacctaatgtcacttcaatagtccatggttttcaaataaatgtcctacctgcccacagactgaaattttagccaaataaatccataaatttaaacatattgacaatcaaaatggtaaaaagaacttttatttttaacttgtaaaaatggttttagaggtcatcaggaagaataaatgagatacatagccaaaaaaaatttaaatacttgccacatcagatattagaatgtgttctaaagctacgctaattaaaataatgaggtaccaatacaggaataggtaggtagagcaatagaagcattaagtataaacttataagagactcaagttataagttacaagaatttgacatatgttaaagttagcatctcaagccagaacagcatgtcaataaattgttgaaagacacctggataaccatcaggaaaacaattaaattagatccctacctcaacaactaaattccaaaggaaaaagactcataacatttttaattaaaaagcactggaagaatatatagatgaccttttacataactttgaaaaaggagaattatgttataaaaatcacaacaaaggcagaaattataaaagataaaattgacagatttgactaaatacatctttaaacatgtgaatattaaaacgctgtaaaaaattaaaagacaaataaagtagaaattatctaaaatatatatcaaagcaaaaactgcatttctatatgccactggtatataaaaatacttccaaatcagtaaatacaaattgcacacaaatagaaaatgatagaagaagctaacaggcatttcacaaaagaagattataaatgactgataaacacattaaaatgtctattactacataattaaagtaattctgaaaccaataaagtacttttttctgcataattctagggatttatgcttaggaaagaatttgtaataaagatccacacacaaggatatctatcagaatgtagtatataacaccacaaatcataaatgagtcaggtatggtggctcatgcctgtaatcctagaactttgggaggccgaggtgggaggaccacttgcagacaggagcgcaagacctgcctgggcaacataatgagatgctgtctcaaaaattttttaaaaagaaacaatttaggggggcggttccaagatggccaaataggaacagctccagtctgcagctcccagcatgagcgatgcagaagacaggtgatttctgcatttccaactgaggtatcgggttcatctcactggggcttgtaggacactgggtgcaggacagtgggtgcagcctatcgagcatgagccaaagaagggcgaggcattgcctcacccaggaagtgcaaggggtcagggaattcccgttcctagccaagggaagatgtgacagatggcacctggaaaattgggtcactcccaccctaatactgcacttctccaatggtctcagcaaatggcaccccaggagattacatcccgcacctggctcagagggtcccacgcccacggagccttgctcattgctagcacagcagtctgagatcaaactgcaaggctgcagtgaggctgggggaggggtgcctgccattgctgaggcttgagtaggtaaacaaagcagccaggaagcttgatctgggtggagcccaccccagctcaaggaggcctgcctgcctctgtagactccaccttggggggcagggcatagcaaaacaaaaggcagcagaaacctctgcagacttaaatgtccctgtctgacagctttgaagaggatagtggttctcccagcaaggagtttcagatccgagaatggacagactgcctcctcaagtgggtccctgacccccgagtagcctaactgggaggcatccaccagtaggggcagactgacacctcacatggccgggtacccctctgagatgaagcttccagaggaacaagcagcagcaacatttgctgttcagcaatattcactgttctgcagcctccgctgcagatacccaggaaaacagagtatggaatggacctccagcaaagtccaacagacctgcagctgaggatcctcacgttagaaggaaaactaacaaacagaaaggacgtccacaccaaaaccccatctgtacatcaccatcatcaaagaccaaaggtagataaaaccacaaagatggggaaaaaacagagtagaaaagctgaaaattctaaaaatcggagggcctctccccctccaaaggaatgcagctccttgccagcaacagagcaaagctggatggagaatgactttgacgagttgagagaagaaggtttcagatgatcaaacttctctgagctaaaggaggaagtgtgaacccattgtaaagaagctaaaaaccttgaaaaaagattagatgaatggctaactagaataaccagtgtagagaagtccttaaatgacctgatggaactgaaaaccatagcacgagaactacgtgacaaatgcactagcttcagtagccaatttgatcaagtggaagaaagggtatcagtgattgaagatcatgaagtgaagcaagaagagaagtttagagaaaaaagagtaaaaagaaatgaacaaagcctccaagaaatatgggactatgtgaaaagacaaaatctacgtctgattggtgtacgtgaaagtgacagggagaatggaaccaagttggaaaacactctgcaggatactatccaggagaacttccccaacctagcaaggcaggccaacattcaaattcaggaaatacagagaatgccacagagatactcctcaagaagagcaactccaagacacataattgtcagattcaccaaattgaaatgaaggaaaaaatattaagggcagccagagagaaacgtcaggttacccacaaagggaagcccatcagactaacagcagatctctcagcagcaactctacaagccagaagagagtgggggccaatattcaacattcttaaagaaaggaattttcaacccagaatttcatatccagacaaaccaagcttcacaagtgaaggagaaataaaatcctttacagacaagcaaatgctgagagattttgtcaccactagtcctgccctacaagagctcctgaaggaagcactaaacatggaaaggaacaaccagtaccagccactacaaaaacatgccaaatcgtaaagaccatagatgctaggaagaaactgcatcaactaatgagcaaaataaccagctaagaacataatgacaggatcaaattcacacaatattaaccttaaatgtaaatggactaaatgctcaaattaaaagacacagactgtattcaggagacccatgtcacgtgcagagacacacataggctcaaaataaaggaatggaggaagatctaccaagcaaatggaaaacaaaaaaaggcaggggttgcaatcctagtctctgataaaacagactttaaaccaacaaagatcaaaagagacaaagaaggccattacataatggtaaagggatcaattcaacaagaagagctaactatcctaaatatatatgcacccaatacaggagcagccagattcataaagcaagtccttagagacctacaaagagacttggattcccacccaataataatgggagactttaacaccccactgtcaacattagactgatcaatgagacagaaagttaacaaggatatccaggaattgaactcagctctgcaccaagtggacctaatagacatctacagaactctccaccccaaatcaacagaatatacattcttctcagcaacacattgcacttattccaaaattgaccacatagttggaagtaaagcactcctcagcaaatgtaaaagaacagaaattatagcaaactgtctcttagaccacagtgcaatcaaactagaactcaggattaagaaactcactcaaaaccgctcaactacatggaaactgaacaacctgctcctgaatgactactgggtacataacgaaatgaaggcagaaataaagatgttctttgaaaccaacgagaacaaagacacaacatgccagaatctttgggacacacttaaagcagtgtaaagcagtgtgtagagggaaatttatagcaataaatgtccacaagaaaaagcagaaagatctaaaattgacaccctaacatcacaattaaaagaactagaaaagcaagagcaaacacattcaaaagctagcagaaggcaagaaataactaagatcagagcaaaactgaaggagatagagacacaaaaaacccttcaaaaaatcaatgaatccaggagctggttttttgaaaagatcaacaaaattgatagactgctagcaagactaataaagaaaaaaagagagaagaatcaaatagatgcaataaaaaatgataaagaggataccaccaccaatcccacagaaatacaaactaccgtcagagaatactataaacacctctacgcaaataaactagaaaatctagaagaaattgataaattccttgacacatacaccctcccaagactaaaccaggaagaagttgaatccctgaatagaccaataacaggctctgaaattgaggcaataattaatagcctaccaaccaaaaaaagtccaggaccagatggattcacagccaaattctaccagaggcacaaggaggaactggtaccattccttctgaaactattccaataaatagaaaaagaaggaatcctccctaactcattttatgaggccagcgtcatcctgataccaaagcctgacagagacacaacaaaaaaagagaattttagaccaatatccctgatgaacatcgatgcaaaaatcctcaataaaatactggcaaaccgaatccagcagcacatcaaaagcttatccaccatgatcaagtgggcttcatccctgggatgcaaggctggttcaacatacacaaatcaataaatgtaatccagcatataaacagaaccaaagacaaaaaccacatgatttttgtctcaatagatgcagaaaaggcccttgacaaaattcaacagcgcttcatgctaaaaactctcagtaaattaggtattgatgggacatatctcaaaataataagagctatttatgacaaacccacagccagtatcatactgaatgggcaaaaactggaagcattccctttgaaaactggcacaagacagggatgccctctctcaccactcctattcaacacagtgttggaagttctggccagggcaatcaggcaggagaaagaaataaagcatattcaattagaacaagaggaagtcaaattgtccctgtttgcagacgacatgattgtatatctagaaaaccccattgtctcagcccaaaatctccttaagctgataagcaacttcagcaaagtctcaggatacaaaatcaatgtgcaaaaatcacaaacattcttatacaccaataacagacaaacagagagccaaatcatgagtggactcccattcacaattgcttcaaagagaataaaatacctaggaatccaacttacaagggatgtgaaggacctctgcaaggacaactacaaaccactgctcaatgaaataaaagaggacacaaacaaatggaagaacattccgtgctcatggataggaagaatcaatattgtgaaaatggccatactgcccaaggtaatttatagatataatgccattcacatcaagctaccaatgactttcttcacagaattggaaaaaactactttaaagttcatatggaaccaaaaaagagcccacattgccaagacaatcctaagccaaaagaacaaagctggaggcatcacgctacctgacttgaaactatactacaaggctacagtaaccaaaacagcatggtactggtactaaaacagagatatagaccaataacagaacagagccctcagaaataataccacatatctacaaccatctgatctttgacaaacctgacaaaaacaagaaatggggaaaggattccctatttaataaatggtgctgggaaaactggctagccatatgtagaaagctgaaactggatcccttccttacaccttatacaaaaattaattcaagatggattaaagacttaaatattagatctaaaaccataaaaaccctagaagaaaacctaggcaataccattcagggcataggcatgggcaaggacttcatgtctaaaatgccaaaagcaatggcaacaaaaggcaaaattgacaaatgggatctaattaaactaaagagcttctgcacagcaaaagaaactaccatcagagtgaacaggcaacctacagaatgggagaaaatttttgcaatctactcatctgacaaggtctaatatccagaatctacaatgaactcaaacaaatttacaagaaaaaagaacaaacaaccccatcaaaaagtgggcaaaggatatgaacagacatttctcaaaagaagacatttatgcagccaatagacacatgaaagaatgctcatcatcactggccatctgagaaatgcaaatcaaaaccacaatgagataccatctcacaccaattagaatggcgatcattaaaaagtcaggaaaaaacaggtgctggagaggatgtgcactgttggcgggactgtaaactgattcaaccattggggaagacagtgtggcgattcctcaaggatctagaactagaaataccatttgactcagtcatcccattactgggtatatacccaaagcattataaatcatgatgctataaagacacatgcacatgtatgtttattgtggcactattcacaatagcaaaggtttggaaccaacccaaatgtccatcaatgatagactggattaagaaaatgtggcacatatacaccatggaatactatgcagccataaaaaacgatgagttcgtgtgctttttagggacatggatgaagctggaaaccatcattctcagcaaactatcgcagggacaaaaaaccaaagaccgcatgtcctcactcataggtgggaattgaacaatgagaacacttggacacaggaaggggaaggggaacatcacacactgtggcctgttgtggggtggggggaggggagagggatagcattaggagatatacctaatgtaaatgatgagttaatgggtgcagcacaccaacatggcacatgtattcatatgtaacaaacctgcacattgtgcacatgtaccctagaacttaaagtataaaaaaaaatgaaggaaggaaaacaaaaaacgcaaataaataaataaataaataaacagtttaggccgggcacagttgctcacacctgtaatcccagcactctgggaggccgaggtggccagatctcctgaggtcaagagttggagaccagcctggacaacatggcgaaacgctgtctctactaaaaaatacaaaaattagctgggcatggtgtcatgtgcctgtaatcccagctattcaggaggctgaggctggagaatcacttgaactctggaggtagaggttgcagtgagctgagatcatgccactgcactccagcttgggtgacagagcaggaatccatctcaaaaaattaaaatagaaaaataaaaataaaattaaaattaaaaataaacagtttaaacgtccaacactagtgacttggtaaaataaaatttagtacatccacataatgtaatgctattgtcaaatgaagttatttatggatatttgttgacatgaagaaatgtttgtgaatcataatatattagtcagttgaaagaaagttgctgacattataaactgatgtttggctaaattataagtacagatgcacgcatatagtactatgggtatataacagggttagtatatatatatggatatatgtgtatgtgtgtgtgtatatatatatatagtgtgtgtgtatatgtatatatatagtgtatatatatacacacatatatgtgtgtatatatagtgtatatatatagtgtatatatgtgtatatatagtgtatatatatacacacatatgtgtatatatatgtgtatatatatacacatatatgagtgtgtgtgtgtgtgtgtgtgtgtatatatatatatatgctttcttgctctgccagctgaaaagcaataacaccccagtagcaacaagcatggctaggtaccagaactagctttgtaatcccattttccaagaaaataaatcagagctctctggagaaatgtctgattctagggctgggacaaggaatatacaagataggtctggagaaagttacagtgccagaaagtaagcaagtgctcaaaaacaaaggaaaaaactcacaatgatgggagtatgtaaaaaggaggtaagagccaattggaaacgttccgtttggctaaagccaggacaattggagcaataaaataaagtagtactgagtaataatccaaggtgtaaaacaaatatcgtgtgtcaatactgatataaataaatgattgaataaataaatggggagaatagacaaatctcccatgcagaagaattccaaataatttacttggagcataaagtgatagaatgtaactccctcctcaagtgtgggccatacacagtgatgtccttccaaagagcacagtatggaaaggggtaagaaagagcaactttacagtggtaaaatctgacaaacatggcctcagtcaagtgatcaaggttgacgtcaacagtagtaagtcacgttgacagtatgaaccttgatatggtgtgaggagaaatggcatgctacctatggcgtcttcttcccaaaaatgtataacctcagtgtaatcatgaggacatcatcagacaaatcccaattgagggaaattctacaaaatactgaaagggagctctttaaactgttaaggtcatcaaaaacaaggaaactctgagaaattgttacaaccaaaaggagtctaaaaagacaggattaaatgtaatgtggtatcctggctagaattctggaacaaaaaaaaaattaggtaaaattgaagtaaatctaataaagtatgaactttagttaataacaatgtatcgatattggtccattaactatggcatgtgctgctgtaagaagttaataagaagccacactggatagggatttatgagaactctgtgtactctcttcacaacctgcccacaaatccaaactattccaaaattaaatttcttcttttaaaactaagtttcatatgacttgatttttgttaagggaggattacaattttatgtatagctgtgtcattatagatatagctatagacatggatatagatatatagatatatagaaatatagaaaagcatttagctgtgctgtctaatacacagccattacctagatatagctattgaacacttggattgtggctaatccaaattgagaagtgctgtaagtgtgaaatgtacaacagatttcaaagacgtaatatgaagaaaagaatataaacaatatcattaatgttgtgttttgagacagggtctcattcttttgtccaggctgaagtgaagtagtgcgatcacagatcactacagcctcgacctcccaggctcaagcaatcctcccacctcagtctcccaagtagatggaactaaaagtgtgcactgccacacctaatttttccatttttatttattttttatttctaggtttactcaaaaacattattactcaattcataaaatagtaattcagttagctggtgcctaaagactgaaaaaattgtaattttccaggcatttacagtttggggaacaaaaaacatgagacctacttgaaaaaatagaggctaataaataattaaggataaggctctaaaaaataacagtattgcaagctatttttaaagagaaaaatttgatagcaaaatgtttctctgactttgtaaatgcacaagaaagatcaacagttttatcacttgcagaaaaggcaattaatgtaatagaaaatgtgatgataaacttctaagaaactaagtgcttatgtctatttaacaatagaagttttacctattaccatttactattcatgtgtcgacagcaatccccttctctcccaactaggcctttcacaattatggaatatagacataaaatattattcctagatacattttacaaaataaaaatgagtaaatggaaaaaaggcaagttaaagtagttatatatatatattgaaaagtgggtgaataaactgaattactttcactaaaatgactatacaatagttaatgaatttcttatttatacaaggggaaaactggatataatatatctttaacattacacagtcatagaaaaatgttaactttaacctgataaaatcctttccccacatgttttacactttggattttctttcaatgtttattttggatccagagggtacatgttcatgtttgttacatggatgtattgcatggtgctgaggattggggtatggataatcccatcacccaggtagtgagcatagtacccaatgagtaaattgttaccccatgacccaccccaccctctaggagtccccaatgtctattattcccatctttttatccatatgtactcagtgtgtagctctcacttgtaggtgagaacatgtggtatttggttttccattcctgcatatattcacttaggatgataacctccagctgcatccatgttactgattttgttctttttaatggatgtgtagtattccatggtgtatatgtaccacttttttctatccagtgtaccattgatgggcccctaggttgattccatgtcttagctattgtgaacagtgctgcaataagcatatgagtacatgtctctttttggtataatggtttcttttccttggggcatgtacctaggaatgggactgctgggtggaatggtagttctgttacaaattatccaagcagagatctccagactgctttccacagtggctgaactaacttgcattcccaccaacagtgtataaacataccattttctatgtagccttaccagcagttgttatttcttgactttttaataatagccattctgactggtgtgagatggtatctcattgtggttttgatttgtgtttctcttatgattagcaatgatgagcattttttcacatgtttgttgactgcttgtatgtcttcttctaagaggtgtctgttcatgtcttttgcccatttcttaattggattgtttgggttttccttgctgatttgtttaagttatttttcctattcagatgccttttaatttctttctctagcctgattgctctggctaagacattcagtactgaatgttgaataggagtggcaagagtaggcacccttatcttgttccagttctcaaggggaatggttccagcttttaaacattgagtatattgctggctataagtttgtcatagatggctcttgttattttgaagtatgtaccttcaacgcttagttttttgaggatttttatcatgaagcaatgttggattttatcaaaagcttcttctgcatcaactgagatgacatatggttcttgtttttaattatgtttatgtggtgaatcacatttattatttatatatgttgaatgttgaaccaaccttgcagcccatcaataaagcctacttgatcatagcgaattaacttttttatgtcacgctggcttcggtttgctattaacagtattttttttttagatggagtctcactctgttggccaggctggagtgcagtgttgcaatctcagctcactacaacctcagcctcctgggttcaagagattctcctgcctcatggagtacagtggtgcaatctcagctcactacaacctctgcctcctgggttcaagcaattctcccacctcagcctcctgggtagctgggattacaggtgcacaccaccctgcatggctaacttttgtatttttaatagagacagggtttcaccatgttggccaggctagtctcgaacatctgacctcatatgatccacccatctcagcctcccaaagtgctgagattacaggtgtgagccacctcacccagccagcagtttgctagtattttgttcaggatttttgtgtctattttcatcagggatattggcccgaagttttctttttttgttatgtctctgccagattttgttatcaaattaatgctaccttcatagaatgagttaaggagaagcccttcctccttggttttttggaataacttcagtgggattggtaccagttctttatatatctggtagaattcaggggtgaatccatctaatcaagggctttttttgttggtggtggtggttttttttttattactaattcaattttggtacttgttattggtctattcaggctttcactttcttcctggttcaatcttgggagtttgtgtgtttccaggaatttatcgatttcctctaaattttctaatttgtgggcatagaggtgtttgtaatagtctctaaagatcttttgtatttctgtgggatgagctgtaatgtcatctttgtcatttctgattgcacttatttggatcttcacccttttacaaatttcttaatctacctagaagtttatcaatctttgtttattctttcagaaaatcaactctcagtttcattgttcttttgtatagattgtatgtctcaatttccttatgttcttctcagattttagttatttctattcttctgctagctttactgttggtttgttcttatttttccagttcctctaggtgcaatgttagattgtaaatttgggatatttctagcttcttgatgaagacgtttagcactagaaactttcctcttaacactgctttagccgcatcccaaagattttggtaagttgtatctcttattttcactaatttcaaagattttttaaatttctgtcttaatttcatttttcacccaagagttattcaggaaaaagttgtttgattttcatgtttatgtgtagttttaagagatcttcttggtattgatttctatttttattgcattgcaatctaagagtgtgctcggtatgattttgatttttttaaatttattgagactcgctttgcaaccaagcatgtggttgatcttagaatatgtacctgtgtggatgagaagaatgtctattctgtggttgttaggtggagcattctatagatgtctactaggtccaattggtttagtgtcacgtttaaatccagaatttctttatcagttttctgccttgatgatctgtctagtggtgtcagtaaggtgttaaaataccccactattagggtgtagctgtctacaccttgatcttttcatagatcaagaagaacttgttttatgaatttgggtgctccaatgatgagtgcttatatatatttaagatagctaagtattcttgtttaattgaaccttttatcattatgtaatgcccttctttatctttcctgaatgtttttggtttaaactctgttttatctgatataagaatagtgactcctgctcttttctgttctccatttgtgtggtacattttttcccatccctttactttgagcatgtgagtgtagttacacgtgagcttggtctcttgaagacatcagaaaattgggtcttgagtttttatctagcttgtcactctgtgtctattaagtggggcacttagaccattttacatactgaattagtattgatatgtgggattttaatcctgtcattgggttgataattggttgttttataaacttgattgtgtaattcctttatattgtctgtgagctatgtgcttagtatgtttttgtcataacaggtattaatctctcatttccatgtttagcattcccttaaggacttctcataaggttggtctggtggtaacaaattcccttagagtttccttctgtgttaaggattttacttcttcttcacttatgaagcttagtttggtgagatatgaaattcttggttggaatttatttgctttgaggatgctgaaaataggtctccaatttcttttggcttgtaaactttctgctgaaaagtctgctgatagtgttgtgggattccagttataagtgacctgacctttctctctagttgtctataatatttttccttttgcattgaccttggtgaatctgatgactatgtgccttggggatgatcatcttgtatagtattttgctgggttctctgtgtttcttgaatttgtatgtcaatctctctaacaagattggggaaattttcatagattatgtcctcaaatatgttttccaagttgcttactctctctctttctctctcaagaatgccaataaattgtagacttgatctctttacacaatcccatatctctcagaggttttgttctttttttaacattcttttttctttatttttttctgactgagttgatttaaagaacaagtcttcaaactctgagattctctactcagtttggtctattctgctgttaatgcttctgattgtatgtggaaactcttgtagtaaatttttcaattccaggagttcagtttagttctttcttaaaatggctattttgtctttcagctcttagatcattttaccggattctttggatttcttggattgcatttcaactttttcctggatctcagtgagcttctcaccatccaggttctaaattctatacctatcacttcagtcatttcagtctggttaagaaccattgctgggggctactgtgctcatttggaggtaaggagacatcctggctttttgaattgccagagttcttatgctgattctttctcatctgagagggctagtgtttctttaagttgagtatagtcagttggcttcatttctgggtgctttcagagggccaaggctctgtacaggatctttatttgtagctgaattcttgtcttaggtttcacaggcactgtacattggcaaaatattttggcagttgtaatttggactgtgatgcagtagatggtgtttaagagtgatgaccaacagataggctcttattcagccatgcagctcttttgtatttcaccatgttctcaatagtgctctgtggtggggtaaggcagagagataactccctcaccaggttcactcctgggccttggaggagccccctccaatcactggggtcatgcccaagtttcctttgttaggtgttctgggctgtggggctccctcagatagaggtcatggctggcagacaggccacttccttcccagaccagccctgtggagagaggcaccccactttcatgctggtccatgaaccagggcatctcaaccctctcagtgttttgagagtgagaacatttcccccactcaggcaccaccaagccagtgagtcttgcctatctaagtacagaaggaccatggaggtcgcatggtcagccatcagggtctccattttttgtggggacagaatcttactatggtgctcaggctgactgtatgttgaaatgacaatattttaggtatattgggttaagtgaaaataattttatatatttatttatgatttcctttaatgtagtcactaaacattgttaaattatatatgtggttcatattgtatttctactgatagcagttgtttaaaaggatagacatgagaatgttaacaatagctattcctagtagtaaagtgtaatttttagcttttcttttttctaatttttcttgaataaatatgtgttccttgtgtaattttaaaagtaataaaggtaaaaatacacaatgaactactgctgtgaaatataccactaacagaagtactaagcagaaatgtcaagtcttagagtcctaattatttattcatttaaatacatatatattaagtgtctcatgtgcaaggcatttggacagttgctaggaaaataaacacaaaaaaagatgagctataattattttcttcaaggggttcacagtccattttggaagttaggctcatgaatagaatattagagtacaatgcggtcagtgatactatggtgatttgtattaactctcctccccttctgctttaaatgttgctgtttttctggctctaaccttagtctacttctctgcccacaacacaattgcaactaacacctatatactaatggctatggctttaactttgactttgcttcagatctctacatccaactgtcttttggtcagatggccattgggcaacctaaactgtatgcctaaaacccatcatctcttcacctcccctgctccagactcttctacctccgtaattcttgtctttgttaatgatgccaccatttaaccagttgcctcatgactctgtaaaaaggaaatttagttactttacttcacttctcaaaattcttcaggcttggcagtgcacaagcctacatatgcccttagctaccaatccaacttcatctcctggaacacttctcatcagcattgacactctagaaataccaaactaccaaactcaggaaacatcacaagttatcacctctcttcctttcattgttgcgtgtgtccttccctctgcttgaagtgtccaacctcatcaccacctcttcttcatggttcctagacattcctctctgttacctcccttgatcttccaggcaaattaggctctcttctctctggctccccttgaactttgtacatacctccaacatagtgattttcccattatattataataccagctttctgtatgatactctattccctaaggacagagattgtatctcattaaccttggtatcctcagcgtcacacggaatgtgacagacagaaaactttcaagtttactgaatatttcctatctttctttaccttttccactctattgtggtcactcttaccctagaataatgtagatgttccttgaataccaaccaggcttcacttctgggtctttgttcttgaatggccttaccccagatggttccctctgataaaccaattagtcactgctcagaagtcacctcatcagagaggtttttccttcaatcctgtataatatagtgcctggcaagaaaaggatgccctctctcaccactcctattcaacatagtattggaagttctcaatcaggcaagagaaagaataaagggtattcaaacaggaaaagagtaagtcaaattgtctctgtttgcagatgacatgattgtatatttagaaaaccccatcgtctcagcccaaaatctccttaagctgataagcaacttcagcaaagactcaggatagaaaatcaatgtgcaaaaatcacaagaattcctatacaccaattatagacaaacagagagccaaatcatgagtgaactcccattcacaattgctacaaagagaataaaatacctaggaatacaacttacaagggatgtgaaggacctcttcaaggagaactacaaaccactgctcaaagaaataagagaggacacaaacaaatggaaaaacattccatgctcatggataggaagaatcaatatcataaaaatgaccatactgcccaaagtaatttatagattcaatgctattcccatcaagctaccattgactttcttcacagaattagaaaaaactactttaaatttcatatagaaccaaaacagagcccatatagccaagacaatcctaagcaaaaaaaaaaaaaaaaaaaaagaaacaaagctggaggcatcacactacctgacttcaaactacactacaagcccacagttaccaaaacagcatggtactggtacaaaaacagatatagagaccaatggaacagaacggaggcctcagaaataacaccacacatctgcaaacatctttgacaaacctgacaagaacaagcaatggggaaaggattccctatttaataaatggtgttgggaaaactggctagccatatgtagaaagctgaaactggaccccttccttacaacttatacaaaaattaactcaagatggattaaagacttaaatgtaagacctaaaaccataaaaccctagaagaaaacctaggcaataccattcaggacataggcatgggcaaagacttcatgactaaaacaccaaaagcaagggcaacagaagccaaaattgacaaatgggatctaactaagctaaagagcttctgcacagcaaaagaaactatcatcagagtgaacaggcaacctacagaatgggagaaagtttttgcaatctatccatctgacaaagggctaatatccagaatctacaaagaacttaaacaaatttacaagaaaaaaacaaccccatcaaaaagtggacgaaggatataaacagacacttttcaaaataagacatctatgcagccaacaaacatgaaaaaaagctcatcatcactggtcattagagaaatgcaaatcagccagagtgagataccatctcccacaagttagaatggtgatcattaaaaagtcaggaaacaacagatgctggagaggatgtggagaaacaggaatgcttttacactgttggtaggagtgtaaattagttcaaccattgtggaagacagtgtggcaactcctcaaggatctagaactagaagtaccatttgacccagcaatcccattactgggtatacacccaaaggattataaatcattctactataaagacacatgaacacatatgtgtattgtggcactattcacaatagcaaagatttggaaccaacccaaatgtccatccatgatagactggataaagaaaatttgcacatatacacgatggaatactgcgcagctataaaaaaggatgagctcatgtcctttgcagggacatgaatgaagctggaaaccatcattctcagcaaattatcacaagaacagaaaaccaaatactacatgttctcactcataagtgggagttgaacaaggagaacacatggacacagggagcggaacatcacacaccggggcctgtctgggggtcagtggactaggggagggatggcattaggagaaatacctaatgtaggtgacgggttgatgggtgcagcaaacaatcatggcacgtgtatacctatgtaacaaaactgcacgttctgcacacgtaccccagaacttaaagtatatatatatatatatatatatatatatatatatatatatatatatatatatatatatagtgtgtgtgtgtgtgtgtgtgtgtgtgtatttaaaaaaagatactttcctaattaaagatagtttcctaccttgaaaaatctctaatgccagctactaaagtaacaatttctcacttatccacaggggttatttctggccagtgagatgatgaatgactgttttatgttaatttttaattttatagtattctcatgggattaaaataattccgctaacctcaaaaaaaaaaaatcaggaaacaacagatgctggagagaatgtggagaaacaggaacagttttacactgttggtgggagtgtaaattagttcaaccattgtggaagacggtgtggcaattcttcaaggatctagaaccagaaataccatttgacccagtaatcccattattgggtagatatccaaaggattataaatcattgtactataaagacacatgcacgcgtaagtttattacagcactattcacaatagcaaagacttggaaccaactcaaatgcccatcagtgatagactggataaagataatgtgccatatatacatcatggaatactatgcagccataaaaaggaatgagttaatgtcctttgcagggacatggatgaagctggaaaccatcattctcagcaaactaacacaagaacagaaaaccaaacaccacatgttctcactcataagtgagagttgaacaatgagaatatattggcacacggagggaatatcacacaccagggcctgtcggggggttgggggctggggagggatagcattaggagaaatacctaatgtagacaaggggttgatgggtgcagcaaaccaccgtggcacacctatacctatgtaacaaacctgcatgttctgcacatgtatccaataacaaagtataatataaaaataaattaaaatgtatattttatatatattgaaattatttatatattttgaaatatattatatatatttatatataaatatatattatatatatttatatataaatatatattatatatatttatatataaaatatatattttatatattccaccagaatataagcatcaactgggatctaattaaactaaaaacttctgcacagccaaagaaataatcagcagagtaaacagacaacccacagagtgggagaaaatatttacaaactatgcatctgacaaaggactaacatccaaaatctacagggaactcaaacaaatcagcaagaaaaaacaaataattccaaccaaaagtgggttaaggacatgaatagacaattctcaaaagaagatatacaaatggccaacaaacatatgaaaaaaaatgctcaatataactaattatcagggaaatgcaaatcaaaaccataatgtgataccaccttactcctcctacaatatggctataatttttttaaaaatccaaaaatcaaagatgttggcatggatgtggtgaaagagaacaattttacactgttggtgggaatggaaacctatggaaaacagtgtggagattcctcaaagaactaaaagtagatctaccatttgatccagcaagcctgctcctcagtatctacccagaggaaaacaggtcattatacaaaaaatacacttgtgcatgcatgtttatagcagcacaattcacaactgcaaaaatatgggaccagcctaaatgcccatcaaccaacgagtggataaagaaaatgtatacacacatataccatggaatactactcagccataaaaaagaatgaaataatggcattcacagcaacctggatgaagctggagaccatcattctaagtgaattaactcaggaatggaaaaccaaatattgtatattctcacctataaaagtgggatttaagctatgaggatacaaaggcataaaaatgatataatggactctggagactcaggggagaacgggtgcaccaaaatctcagaaatcaccctaaagaatggacccatgtaacaaaaacctcttgttccccaaaaaattattgaactaaaataaaataaaagtcattttttataaaagaatctaagtatcaaaaagcccaggactttgtctgaattattcaacaaatgaataaagatctgatacatgtataaataagtaaatgatgttatttatcacctaaatatgacactgtctctctgactttaattttcctttcatctgcttatttttcttcccaagccatgaatatgggacaaaaaaaagggattaagacacaaacaccaagaattggcaagtataatgaggctgaacttgaaaaataacaatagttcaggtaaccatatattaaatttgtctcaagaatttattttattttctcattcatttattcaacaaatatttacatcacgcctattatgagttctttttgaaaatgcaataactgtctcttacatttgtaccattgtttatagtttacaaggtcctttctgatacttattttaacgtatcctcataaacaattctttgaggtaagcaggtcttatgaggaatgagtcttatgaggaatgagttaccagattaaggatcattgggttgtaaaaatcttgagctagaaagcattccatcgttttattgttgatacaactatatacagaagcccattatcaatctatttatttcaccacagagagctataatacacccattgaccatcagtaccagtatattaattttcacttctgggatttccagcctactcttagcttcaatgttagtgtgaatatttcatggtagaatgcacaaactttgaggaaggtgcaatgctttccctgtttcttccacttatgttcaggttctgcacatactgtatgttctccataaatatttattggtgaagagaacagttattaatgtaagaatctctctattcagaaaatatccaaggaaactgtgatagctgctggtttccaaagatggtcttccaatgaactatgtctctcagtattcggaattttgcataattccttccccttgatctggactggctctgtgacttggttataaccaacagaacatggtggtgggttaagcaatactcatttcatagggggcatttctggtcacatgatacttaatggtccatggtcaaatactaggatccagcaaagagccaagagctgtttctcaaaaaaaaaaaaaaaaaaaaagaaaaagaaaaagaaaaaaaaagaaaaaagaaaaaaaaagttatctgcagagtatggcatggctttgctcccagattctaaaagtctgttctggaatttacctaagaggcctgccaaaagctcagtaggcactttaagcaccactgaatcagatgtgtcatatgaccaaagtggcagggaagcttgccaccctctcacaagggcttgtctttcgccaggccttattcaaaactggaagcctttcagattactcattcagcaaataggtttagactataacaacacacccaaataagatatgttgcctccaaaatccaatgaggcacaccagaaattgggactctttctttatggtaggagagaccagatgtagcattgaacttcaccttgaaagagatatctcaactttccccagaccatgaaaccccaagaaagttcctgaaggagcaaacttctaaatttttctgggatttatttcacaacctcttgcctctatgggtcttaccaaggtgtctaaagtagttgcgatttcctggtccaccagtgtagaggatccatgtggtgtgttgtgaaatgaagaggcaatcaatttcctgtggaatagaataggccagggttggagagttgatataaccctgaggtgaaacaaggagggtaccttgtttcacccttccagatgaaagaaaaatgcttctgatagtctctactaacatgtatatagaggaaaaaatgacttcccatatcagtattcatatattagatgtacatatattgatttactatagcaatgaaaccacatctggaacagcagctgtgattgtactcaccacctgattaagtttacaataatcctttgtcattcttcaagatccatctgtcttctgcacaggccagatagttgagttgaatggaggtgtggtgaaaatcaccagccctgcatcttttaaatcttttatagaggcactaatctctacaagtctctacagaatgcagtgctgctgtggatttactagtttggaatacaaaggcagttctaatgccttctacttgtcctcactcctcagatcagataatcaatgtagttattctgcctttcctgagtgtgcctccttcagttaagcattctagaacttgggaaataaccatggggtaagttcagagctaactggatgcaatatgagatggacctgagccaaaataccattaatcattcagcttcaataaacccctactctggtaaataggcaatagtagcatattgtgtctccaaggactggtatcatttcagagccaatgtccagaaatcccccaaaggtctggttatttacccttcccaaatgcactatgaccttggcaaatggctttaggtcttttcagggaaggaaagaaagagaaattacagtctaaacttttggaatgtaaatataaattagaaaaaatcctgcagtccttttggcaggcagggtacctcatcattttgttcctgccctgatatgggttgccaggagttgagtctagctataggcatacaaacagtgaaagatgttgggggtgagtcttgaggggtctcagcaattttccacagagtaagtccttacagccttttcaatcaagggaggactaaactcctcagagggaaaggctgcttctgctgggaaaggagacagggctttcaaggttctcagcttccaaagaatctgcctacatgttgccatctcaattttcaggggaggaaagaaggagaaattacagtctaaacttttggaatgtaaatataaattagaaaaatcctgcagcccttttggcaggcatggtacctcatcattttgttcctgccctgatacagcctgccagctctgtcccaatcaaagccctaattttaactgtaagaccttcaattgaattgatgttctaatctagctagctgcaggatcagtctttgggcttggttttttgaaatatcagatcttgcagctatgagagataagagtttctttcagagtagtcacaaagacttttcagtcccttgcctgcatcttgaactgaacattcaacactctgagtttatttctttttctccatattctctgtgacactttgaagcaacccacaaactccagtcctcatactccttacttccactacattggtctatggcagcatctacctggtaatctaacaccttgccttctataagcacttgatatcaaggactactgtgtcccatttaccattggcagtatagtcactaatgcttcatcgaatcagagaatcaacaccaaattcccatccttaaaattctatctctggattcacttccaacaccaatagttgtatcagttaagagtcagtcagggaagcagaaccactgtgaatgatacagaatataggaatagtggattcgttgtggaatcagaccttacaaatgtgagagaagctagagaaggaaaggtctggaagaaggagtcagaagatcagaaaaagggtcattaacctgtctatcttatgcagtagcacagatggaccagacaggctggggcttgggggaaatctaggaagctaaacactttcaaccaccaaagtgggactgtgaaggggagctcatgaagaactgtatggagagtggttacctgtctgtagcaaccacttctgtgggtccacagccaagtagttggtgatgggtctcgagtcactgttgttcagcagagccaagagtcagaaagattcgctggatgcagagtgaaggaaagcaaggactatatgggacctaccaagcatctctccctctgtccatcactgtatgtgaccacagtgacttcctaagagtaatagttaccacttctgtgttctaactcttttcccatttcatctcttagccaatgctaatacagagcgatacatgaaaggggattctgagaaatgcagttgtctgcttaagcaagttgaccagcataatccagcacaacttctaaatctcagaagatagcaaatgtgggcagaaagaaaagtacagatgctccacgggttcactggtgatctttatggctgcaactgacctaggatttgggagatgcttggagagggacagaggggcacacaggaactttcctctcaaatatgaggatatcaatctagatctacgaggagtccttttggagataaaaagaaatttataggagatgatgaacaaaaggcccaatttctatattagactgtctccctgaatgagggtgaataccaagaggagactgagccaaggcctcagccctctgaattctaaaatgtagagaatttcattctgatctattttatacaaatggtgctggtctctcagacagtaccttttccgatgaaagaaagagagaaacgaagtagaagattcgtaacccagctcagtaaagaggcttacctttgctctttgctcaccatcattcccccgctcaaagtctcagctacctgcctctgtgcaatagctacacagtgctcctcaagtatctgcctcctgaacacagaattataactaacaagtatttaaaatttatgtatttggtgcacatctttcagtatgagctttttggcaccaactcttactgaatgccaatataaaagtaaacaatttgaaattattttaagtgattatcaaaaataacagcataaattctatgatgtggacttcagccacagtcccttccagggactcttccaggcagaccaaaagagaaaagctgtctgcaaaagaaactcaaagttcccaggaccaatagcatacttgagtcagatacagctccttaaaagacaagtaattttcagaggccctagggtaaactaaattagttttaacataatactatttaaacatgtagaaacataatatgatttataaactctatatgcttattgctcttatgccaacaatttaaaaatataaattaaacattcacaaagcttcaaaaccactacaacttcaataaataattttaatttaatgtaatgataatacttggctaaaactaaatcaccaggtttttttctttccaccttttatattaggtttaggtggtacaggtgcaggtttgtggaatgggtaaatatatgtcatgggggtttgacaagatacagattatttcgtcacccaagtaataagcatagtacccaataggtaatttttcaatcttcactctcctcctaccttccaccctcaactgggccctggtgtctattgttcccttctttgtgtccatgtgtactcaatgtttaactcccacttataagtaagaacatgcagcctttggttttctgttcctgcattaattcacttaggataagaacttccagctccatccatgttgctgcaaaggatgtgacttttttcttttttatggctgagtagtatttcatggtgtatatgtaccacatttcctttatccagttcatcatttaagtcaccagttttgagtttaatagatgaaagatatatacgtggtgctgggttttgcttattaacttgattcttctcattttgtacataattttcatgcttgttttcctttgtttgaaacaaattcatattgaattgttaattaattcacttgatgggccaatcaatttactgtgcaccaatagtacaatactgaaagaaatatttttaacttttaatgaagcattctttactattgctaatcaactgtagtacagtgatttatacaaaagatgagctctacacagtacagccatgtgaatggggaatttagcaccaatcattcattgagttccccatgcttacagcatctaacttgttatgattctattttccaatgactgttttatattcaaattacttgacattattaggccttcacttagtattaaagtaactattagtattagcaaagcagggcatcaaaatattgtgacagtgtttgcttatagttgttcagccccaacgtgagttagttgtgttttatgaggggtatgtactccttataattttgcataatttaaggcttatgtttccgtggggaactggttcacagagcccaaatacctacaactttgtagcacatttctgttttaatgccgctctttattttcttagcattatctaccatatttagcaactgctcttttctaaattagtggtaaaacacatcaagggagttgtttggctttttctgtgggagtgaattatagctaacatctgtgaaaagttatgtatctgaatgcacattttccagcatgagctttagtaccaactcctaatgaatgctactataaaaagaagtaaaacaatttgaaattatttaagtgattattaaacataatagcataaaataaccaagatctcttatagaaattctcataaagcaacaggtggaacataccatactaacaatggctggttctttccattaaagctgaagtagctccaccatgtggcaggagtaaaaacaatctacgattcctttagcttgttcaccaactgaaattacacaaatctcatttaagtttgatgagaaccacaaaattacccattcttctcagaatatatgggctattaatttttatatcacattacttaaatttcacataatttatgctgcccaactacatgttttagactaccattccattgaaaacacatttttaactccataaaattatgaagacccatgaaaattctagagatgcatatattccaagtataataaatatcacaaataacttttaaattcaatttttaaataattcttgttactattataatttccatacaggtctcagaagcatcttaaaagtaatgataactttttgtctctgtaaaaagaatactattcaaaaaaggacaaaaagttcataaatgtggaatactaactttgtaactaatatataaaatacatgagttttttgattcctaaattcttccaacagaaattcaaataatgtaaaatattggtatctttaagccgtaacttattaccttgttaatttcaaaacagcatactagtaacctgatctttaacattagttgttaccaaattatagtttttaaaaaatttcctaggaaagtacgccattttttgggtatcgaacatctcacctcataggaatacggggattgttttccttccactcttttgtattttccaaattttcaatgtaataagcacatattaattttatgatgaaatgaaatttgtaaaagaataaatgttaacattagaagataattaacaagttatctatctcgagtcaatatacaatacaaggaaattaatataccactttacctggtggcaaggaaaataggtgagatatctttcccatcacaacataaaaatatatgttagtaaatattcatattggaaggaatgtattctatgacctagcaattacctgcgtcccagtcttggcattactcttattgtaaaagaaagcatgaacaagcagcaattttggggccataacaagttggaaataacataatcatatagtaaaaagtgatatcacaggttataataagtctatgttccatatattaaaaataatgacacgaatctacatataatgaaaagagaagattgccaaaatgcattattgattgagaatgcaagttgcagaataatatatacagtattatgctatttatgttgataaaaatattgtacagtataaaccctaaatattgcacagcaaaaggactgtaagtacattgatgaattccctgttattagtacctgtggaagagggaattatattgtgggatgggagaacagtcagtggagagtttggttttaattgcaatgcttttatttttataataaggatgtattagcatattacttgcataattaaactttgttttttaggttttcttcttcaccatcgtatatttgcatgcatatacctatgcaaataacaaagtccacctttattggggatttgtgactggcatttttctaagcactttgtcatgtgtcatatattgtatcatgtaaacttattattaaccttatgatgctaataatatttttcccatttcacagatgacgaaaccaagcctcagaggaactgagtacattgcccaaattcaccaagcccgtaagggttacaatcaaactttgaatccagatatctgtctcagagtccacaatcttaaccaaaattttttttacaaattcccatgtagaagtgtgtacatccacatacagacgtgcacacacacacatccctgctgtccagccttttctccccctgacacttgagtgcacaggtcattggcatcttctctccataactttccaccattgacagaaatgtgtttgctcaagggatgaattgaggtgaaaaccttacaacattagctcttttgtaaaaaatctgagcagattttttattttgtattttgttttcctggttacgcctctccttttaaagttttgaaaggtggcattaatatctatttctttcctgactgctccatttattagtttcattaggattagtgaattctacttggtctttccccaatccattaatattttttcccttcacttaaaaacaaacaaacaaaaaaaaaaaacacttgttttccaaatggctttggggtggtagtaggatttcctgatggctagaggaaactcctcatggcagtatcttggttgagtaattggtcctcgtctgtatgttcaagaaggtgaatgttcttagtaaacccagaggggatcagcccatcagaggtaagcttctgctatgtaaattgagacgagattcaggcttaacctcaaataccaatgcatttgctcttctggtctctcccttctcctccttattatcatgatactttaaaagccaaattactgataagaaatttgcttgctgagaacatagaaaggtaaacggctcgagagagggggttgtacatttttctttaaatctaaaaaaccactatgaagaatcccaacctcccaacaaaaattgcctctctgttaactggattttacctgcatccagttttaacacctctctcctctggacagtgctgacactgtcctcctgggaattatgacttccttagacacataatgctagagtcaagttggaacttagattctttttcttgcggaagtgggaggcattgtgtcttctcccttcatgcattaatttaattagaaaaacattcactgtctctcactatcagcctacagattctctatcttctcagcccggtaagagccttatcacactgagataaatggttctctttgttgtaccaaggtggttcctgaagcatggtaatggggaggagacacctagagatcaaagcaactaatacaatcaactccaatccagccccaaaccaagtctttccaccagctattcctttcatatctaaatgttgtcctcttcctctgcagcaggatagaaaatcaatttctaagtgtaaaggcagtaaacaaaatttcagagatatatagtatatgtaagtttgagtgcataaagttaaaagattcccaaatatctaaaaatgtttgaattaaaaaatcagtatcaaattagtaaaaaaaaaaaaaattaaaaaggtacgtgagctgtataacagtcaaatgttaatatgcttaatatattaaaagtgtatataaaaggataaggacaacactagcctgatggatatataggcaaaattcggatacaaaaattgtgtataaattactaatgaatatttgaaaaaaaacactgaaaattttaaaatgcaatgaagacagctataattcatatcaagttaacaactatttttaaacaatcacaatctaatgctgatgaaattcggcatattaagagcaattacatttttactgctatgattgcaaattgatacagtataacagtagattatttggcattaggtatcaacagcttttaaaatagtcatcctcttgacccaaatattggaaatctatcattaaaagggtcttctgagcagattttatataaggaaaatgttcattaaatatttttcatactttcacgtaatttgaaataacataactatccaacactagagaaacagttaagcaaattgagcaacatctacccagtagaatactatgccaccattaaaaattagattttcaagagttttaaattacatgggggaaaataaagttaacagaaaattgaatgtacaaaacggcctcaacaatgtcagaaaatatacttaagaccaaagactaaaaggaaatatgccaaaatgatgtagttattgtctctgggtagtgagataatagattatttccttcttcctcttctttttataattgtatgtaaaccacaatttcttcttcaatgaaaacatatttttataatgagaaaaaatgatctaataacagtatcttttaaatacaaggttatgtgccctgaaaacattcctagtttcccttaaagtcatttgtctaacataagtgaatttgtctgaatctctctagaatacacattcatatgctctaccccaggagcaaggagttcctaaaatctactccctactatgtaaaataaaactgcctttaattttttcctgaatttgtttcagacttcaagtagagttctttattatttctgttcaacagcacaaactacaaacataatctgtttggcaaaccatttttattcaaaagtataataatgccttgtttttcatccttccagaggacctagtggaagaaaatgcctaacatcagggaacagtaggagcagcctaaattgaccacagaattgtatttggccactgtcctcaaaaaattcaagtggattcagtaatcctgaatacttatgtacaacaagcattcctactataatagatcatgaggattaaaatgaggtgagttcattggtgagcatgacatgtagccatagcaattaatcttaggttccttctcccttaaaaatggctaataaaacagaagaaatgctgtatgaataatttcagaataacatggaataattgtagatatttctataagatttgtaccagatccactagaacaaatctaccagtagctaaacactgtagagtctctaaaaatggacaaggaggagatgtgacaaagatactctttaggggaataaagtcatcctaaaaactgaagatattttctgctctgccaatcaaggaatcactgttctttccccagcaagaaggagagtgaaaagaggaccaaattggaggccccaaatttgcattttaatcataacctttcatagctaattatgagatttgagcattctctggatctcagtttgccacccataaaatgatgggtggactgaaagatttctaagttttccagttctgacattgcatgggtctataaggagctccatcttggttggcccctgaaggcacctggagactttggttttagggaaccaaggagtctcagtgctgaatgaggatatagttccccggtgtagaattttagaaactatgcaagcacttggatctttaaaaaaaaaatagttggtccctgggctgtctcttacaactttaatatttacactatgacaaagtgaaagtgctcattcgtgttcgagccaaagtaataccattctctttattcattccaatgagctaattttacatgagcaagaaagcactggagaggtacagacccatgggatatttgcctagcctaagtgagtctcagatggaaataaatatgaaaagcgttagcatgggacctgtgagaaattgattcttacatctggcctccaaagggtcaagccacaaataagtgacctttgacatgccccttctctagttcagcctggagctgcccacatttcccagtggtgcccagtcaactcattctcctgatgcaggatcatcagagagaatctggagtaatggcagctgcgggtaaggggctgccaaataatagtggaacaaagatctcttccaagtttctatttcctccgaatagctcaaatacttcaacagtccaggtccccctaaagactgcattttcttagctgcattctctctagttgtgatgagtgtctcaaaaaggaacacctctcctcctgagtttatgatagtttatgacctgccacttcatttccagcagtgtgtcccagttcctcttgcaatccacaaaggacactttttctttcagtagcctggtgtgagctcttgcctctcaggattagctgtgatcttactgctggggtgggagcacacttagccacagggcccaaaagaaatactgtcactgaaaagagcactttcctgtatttgagggctcttcctctcttctggtacacccggggaaaaacctggcagagtccacccacagtctttgaggattaattctgtaagaacttcttacactgaagggaatcctcctccaggggatgattctgctctgtgcttctgagctctgatggcaatcacatcaacatcgctggggactgtggcagaagaggaacatcacccactggaaaccggggcaagttgctcctctgtagttccaggaaatggccagaggcacagctctgctgttccaatttgcagttttctctaacatcaaaaataaaatgtgatttgcatttgaaattttacagaattcctcattttaggtcaagactggccttacccataggttagtgacttatgtggtaggatttaacacacacacacacatacacacacaaatattatccataaaaagaattatattcccaccaacctgctgtggcattcatcagtgaccctttgaagttcagccattgaaggggcaggttaaaatgcaaatttgtttcttggagaggtagcacatagagctattatcaactgttaatgctccggtattgctggaatgtcagactaagaagtttgggttaaaaattaacatatcagtaagtgaagactggctttatatattacatatttaatttataaaaatggtgacattaaaaggtggcaccaaaatgtaaatagaatcaagatcactttggataaattaacgcatgacacaagcctttgacatgttattaatggaaatgagtttgggggatctaatttagcctttgagattagtgtcaacaaagaaaggtatctcctctggtgcccatggcagaagcagaacattagtacaattcaccatagatcagtttcactttgtaattcagtgtaagtggtttatatgatagagagggcaggaagatctggttttgactctgtctctactacttacaagatgcatgaagctgctcaagtcacttaagcaaggtgagcctcaggttcttcatctacaaaagtgggatgtagaaaagaagagtaaatgtaaaattcctgttcagtagttgtctattaaagaatctctccttccttcctctattcacatccatcagggagaggagtaggctgatggtgccagctaaggacctcggcactcctagacctattcctgaaccattaatggctctgaatttgggacaggaatgttactctcatggttaattccttgctcacttgtctgctggtgcttgttcacaatgtcaaagatatggcaacttcatgggaaggcaggtttaactttttggtgtttttgcactagcctgtatatctgtctacctttcatttgagaaccaccttgctgattcagactggaagcttcaagagagaagtttctttccatttaatgcactggggatggtgctcaacagagaaccacactcaaatcggggctaaataatatggcaatatcatggttgcaaaagaaacacctccctttctcaccaaatcactgaatcccttattctataaaaatgaaattgaactgcaaacatcaccaccatgacaagaggatttaggcacactgatcaactgattaaattctatttgtcatccagagtgatcctggaggccttcagagcctggaggaaacctctctgtgactctactcacatctttacacacggaaaatccaattaggctgagtatctacagcagcttccagaagtaaactgattgcagaagggcagcctgctgcctgaggactgcaggggacgaggaaggggtgggccacctggaagggacctctgccttctcagcacctagagttggtttccagatgatcacatagtttaacccttttcttttatagacaaggaaattgaggcccagaaaggttaacagtcttgcccaagacctaagattagaaggcagagtcggggttgagaattgcttatgtgagactcagacccaaagcagacgaccatattttcaaattcagtgaaaactggaaaactcgtatgggcctacccagcccggaaaatccccatgtattaccaatacatagtaaacgaatcaaagattgaaaagtttacttgaaaaccaatcagaagtcctctcccacatgcaaaaatcccaccctaatagaacactcatcacccgtcagactgtcttaacacttcttcctttttctttctttgcaaacccctttgagcctgtgccagaagtgacggtgcctgccaccctctctgcagtcagtcctgaccagttctctggggtttacacctgtcctctggccactcgtcagctgcacttcctgcatctgcttgtttcaccttggccccagctttacctgaggggtgcttggcctgtgccttgagttccagggcctatgtttacttcaaaaatattaatgtcaattccttcaacttgttccaaagacaacagagcctctcacaagcaggcaagccctgccacttgttacgtagttgaggctgaggagcctgcaggtcccagccaactttatcacctccctcttctgaggggtggaagtccccaacatctcagggtcccctgagagtatggggattcccacatcggcaagtacctgcttcagagaagcccatgagaaactggcccagagcaagcgggtccaccctcccattgtgggaaagtgaagggcagaaggagtctggctggaggtcactcctgccactgatcttcctcactcgggtccagcctgtcagaggataaagcacagtggtgggtgggggtatctggctctcccccaccctccttctcaggggttcagtagtccctgggaacaagattcagctcaggaatttctgggatgctggtcagttctggccctaaggacactgggagtgacagcgggctgctaaggatgtgacagtgactgggctgttcccttcacatgactaccagggcaagccctggccaaatcccagcacctgctgaaagttgaagctgaccactggagtgattagattcatgacatgtggtggaggcctggggagtggagctactgggaaaggacacagctaaggaatctcctccctcccagcattgcttgaccctttcacaaagacagtggtaggtagaggaagaaggagaattggcctactccttccttttcgctgtatatggtcatagaaattgtcagaactttatatctagattcaagttctatctctagcacaattagctctaaaactttgcgaacgttacttaacctcctaggtcctctttgttcataaaacgagaacgtaatacataccttggttggctgtgaaagttatatgagtcagtgttgtggggaagttgaaggcatgcagtagatgcacaaggaaaattaaattccgttccccagttcctggcttgcaagttgggggttaaactcagttaagctcagagaagacatgacatgacgggggatcaagggagatgtgggaagctcacgggctgtggttcccactgatccacattagactccaaatgacaacaccctcacaatcccatgaaattgagcagaatttctcttctttcttgtgatgtttccagaaatgaagagagagggaaggaagacacagactctgatctttggcttcactttggttccaagacctggagctgatagtgtatggagggttgcctgtttgtccaggcactatgaataagaccaaggtaatccagcccaactctacgacacagctaagccaacaagcagctggatcttgtgtctcagcactcacagaaatgtataaatcatctgataccaactgctccccggaagcctctgtctccagaatataaatgtccaactacaggactggcaaagaaaccaagccctgggcaatgcctactatggacccttatttcttgtggtttgctaagaaaaaagtaggcccaagggagaggagggggaaaaccaggagggtctaaagttcttctgactgaaagaaaagaccacatcagagagaaagaaaggaatcagttaagtaataaaaggttgtgagttgatttatcattcaactaaacaaattatcttcctacacaaacattctgaggattaagtgaacaatataatacttttctgagctctttttgatcaaatgctttgctgttaaaggttatattcctagggagttgatactgaagcttcttgttccttgtcagtaaacacaaggagaggccaaccctctgtaaatttaaattacataaaacctttccccaaactgtctggtctcctaacagccccttttcactgaactctgtggttatggaatgtaagtatctttatcacagcagcacagacttttgaaaatttgacataatagaatttcttcctcacaaggcatatcaaacaccattgcaaactagtgggatttttaatcaagactaaagcagaggtcttttatttgtttgtttgtgcttagattatttccacatgaccaataaaatgttctctctgaccatcatccctgctgactagaagtaccaggaaccttgtctcaccctcacctccagaggtaagggtatgaacggactgtgaaaaaacacagcagaacactggggtcagcagagagaaagcgaaagaaccccatgggcagataatctaaaagcagcagagaatcaacgggaaactaacacaagtgcctgaagatggagacagcaatttttagtgattttggcttgtctctgttctatgaagctccaactcagtggcaacctagtgtgaaaatttatgaaatacttttggatttatctctgtaattccaggtctggcacaatataggtttcttgaatgaataaatggatgaacatgtcaatcaatgaatgaacagtaatattaaggaggggaagaaaaccattacaggtcaatgaatgggttcctagaagattcccctgtctcccattgtcttccgactcagggagacaacagctggagcagagtgcctagacttcgggggcttaggaggccacacatcttagagagcatttcaccatcaactgcaattcctttggcagtttgaattataatatttacttccatgatacagtcttcagctgttgtaactgctagtgacccttctctgaatccctacttcgtatgttagacattttttatatggagaattaatacagccttgactgctatgcttcttttttacttccatctctaataataagatcctcaagggtcgagactgtcatactcttgttttttgtgtttacttcactgcatatcctagagctgagtacatatggaagaatgaatcaattgatgaaatttatgaacacatgctgaggtttaaagagaatatcaactgcttggtttgatgacaaaaagcaacatcactctgtgtctagcacgtagcccagaggtgcgggccccatcctctcgtgtgaggagcccacggtgatgcataggcacctgcaccccgtgcctaaaccctgcagctggcacgggccctgtctgctcttcattcaccgttctcacgagttgcaataagttcagccctccatgtcacactgtgttttccatcctggggagtgtttcacagctatcccaagccccacgctgacgaatcacggccgaaaacacactctgatgccagcacagaccacggagcaaatgtcagacaagatcagcctcggaaaagtgagtcctgaattgcgatggaagtgggcttcctctcacaaggactttgtgtggagatgcgcaggtgggctgttggaaaagacccatggaattcccttcctctgggtgccttttctgtcccaacctctggggattcctcaagaatcggggggatttcagcacggagtgtgggactctgtctgccccaagatcagaggattcaccttggcttttggaaagaactgcccagtgtatcaggtttttatgagtcagttttagagttgggaatgcggacagatttgtaagaaagtccacagagcatatctctccacagcggagaaggctctcgagccccagaaggcaatatcacggtggcctaggtggatgtcacggggtgagaatcaaccctcagttgccacgaggaatctgaggagatccaggattacggtttttatgtaactgtcttacctctgtttcacaagggccaaaacttcagccccgttataaaatcaacagatgcagaaaagagacaagtggccactagatggcagcagatggtaagaaacgtgagttgcaggcgggctgggcaagagttaggctggaagcccctccattttgctttacatctttaatgagatatgtgaagaaaattagtcccttacatgccagacgcagatgccacagcatatggagagatgccgcacagcaatatttctctggttattaaacaggaggcacctaaccagtcattcactgcatcatcatgcagagttatcctttaggtctccggatactgttgttgacaaggtaataacagaagaaagcagttgagaagactgatgtcgggacgtgggcctctgggctcgtgggacttcaccatgccaggggatggggcacattgccagaaaatgaggagcagcccactggggccacttttccgtggccagggggacactgtggcttctgctgccaggcttagtcccagcaggcgtctgctgctctctggtccccctggcagccctcgggggctcatttattcagaagccccattaccgcgagacaattctgcggtctgacctttcaccacaaatcccaaatgggaaagggagctctgggaattttaaagagcaaaccacacttgcttctccagcaaaattgaaaagatacagcataactagagtgcattcaggtgcacatagatagggaaacacggtttccatgctgccccaaacaaaaggagggagtccagtcctgccgactgcaggaaacagcctcactcggaagacacactttttcttgggagagtgttcccaggtccagagcaggcagggattgcgcccacttccccacttctcacacttttctccaaccccaccactcagtctgactattcctttatttaattcttccacactcccaaacccaggggcttcataaggccttcagggtagctgaggaacagagaacagattattcagtccaggcaactagtccctgtctcaggcccaacaagaaactgttatcttattaacctgaaagcccagaactctcaggacttctcagagtcactcatgaagccccttaacagtcctgaaatgaagataaataatacagccatttttcgtacagagaaactgaggtataaaactgagatcagctgcagctctcctggtccccattgctttcccacagattcaaccctctgaagcatcctccagtgaaaatgtagtagcaagattcaccctaccaggatttctctccccctcttagaaaattacttcctgcgctagaaatcctcacttgtctgtgtgactttagacaactcgcttaacctctctgtgcctcacttatcatctgtaatttgagggactagaaccagatgatgactaaggcccattccagctcacagtcttgtggctaatttcccagtcctctgccagccctcaaagagagtcgtatgggacactttttccagcaacagccaaactcaacaggagcaagcagaatttccttctccaattgagaagcaatggggtggtggttggagtcttgttgatgtcctttgtccttggagtgaggcaaacagtgaggcttcagatgttattggcactaacagcagggcctggaggtggccacactcttgtggaaggaccatgcagagctgtccctgtgggcagtgtaggtgcatagccaagactgagggatgttttaataactacttctcaataagaagacctattttattctgcacaggggtgtggacccaatccaggtctcccaggaggaatctactctcacccataataggggattggttcagctcagctgcgctcacaaagggctatacagcatgcagcagtacaggcagctccccgcagctccatgtgaaaatgactcacagcagttatgaacatcaaacctcctttgatgtgttcccagacatgaagaacagccacgggaggaggagacggactctggttgctagctctgtggggtggcgcacagagggcctggacacatctggtaccatcctgaagctccaggagaaattcaggctgggtaattacctaggacttcctaggataacagagcttcctttcatctatctctctccctccctctcactgtctttctgtctccagctacaagggaattagattctccaaggaattacaacctgtttctgtaccttcacctttcccgaggagataacaattcacatccctgaataaaagttgttttattgagcacaaaatgaatgcacccccctcgctcagcatctgtgccaattgccttaaagctatagacctggcctccatcagccaagtgaaaggattttcctctgtcatggccatttccagactctcagccttttgagtagccacatggtaccttgtcctcctaataggctctcaatgatgattgaatacaaaggctctaattctctgttgcattggcagctcccaagactgggtcgatcacaatcgtccacagcagaagacagcggtgctgacggtcaaatgagcatcagggcacacagcagaaggggagggtcagccactgtcccttcatgcccatttcaacagaaagcttatttatatgcaagaggtgttccccttccagacagggttcaagagcacattggtccctggaaacttgagcaaagtcttcacggttatagaagggagtggcaaaggacatgtaggagagaatcagttccaccccatgcctgcacatttcattttctgaaatgaaaagctctcatacactcacagagatctgcacatacccacacatggaaatagcataaacagctactctttactgagcagtgaccacgtgtcaggcacaatgcctcgggcttcacatgcatcatctctaatcctcatcgacgttctgggtgtgggagtgagggcatccctgttttatggatgaggaacctaaggtcagaaaggctaagaaactttcttaagattgaacaactatggtagaagagctacaattctagatggttggattccaaagcatcatctcttaaccactgtactatggggcaatatgcttataagcaagtgcttactctgttggaggcactggggttatgagatagtgcaggaaagacatagttattcacttcgcaaagcttcatttttaccgcacactcatgcacacagtgctacacacacacatgcagagttactataactgtggtgtcttccaagagccctgtcactaaggtatcctcagtgtcgtactctcagtcctcctgcacttgaaccacagtttgaattgtgcatagggtaaagactgaggtcttctacagaaaggcctaagctgcttgaactttacagacaattatgtgagcaattcaaccttttatacattatgctgtagttacccagctcctgaactagtcatcaggtattttatttgttttttaacgtgatcaggaagtttctctgactcatttctctatctttgcagaggaacaaggtaggagagcaacaggggcaggaacagagaggatgtcaagcttgatgaaggttcagtaagtcaagtcataggtcaactagaagaaataaagcaggggaagatttggggtggggctgaagctccattgtttccatgacaccataagataagtggtgatctaggtgatctaggtgtgcaaaggtgaaacaaaacgaaagacgcaaacattgtactagtttcaggttttgccaagagcagattggctgccaaggctacttcagccttgactcatatagatccatgatctgggaggcaagacagcgtcctgctgtgctggacatctcagtgacattgacccaactgggggaactccctgaggttaagaaaacctccctccaaggctgagttaatgaactacctagatgtaagacaggagactgaaaccatttaagtcccaggaaaaatgcagacttaccttcttatgacctagatctctttgcaaatctaatgaaaaaggtttgttatgcacaaatgtttccctccaattttatttcaggagatttgtgctctttcctggactgcccctgaacctggaggtaataattctagatcaaagtctccctagaaccttgtaaagggtggactgagaagactggatatacagctctaggcaaccagtcctccactgccaccaccatgctttctaatctccaggggagcctggtcatcttgctggacaattgctgtttctcctgacaaaatccaagttaggaaactgacagggtctttgtttctatttctctctatgcctatctctcaaggtgccctgtcattaatgaatcttaatcctcacttttatttctcaactctggctcccaatttctgttttcccacccctcatctgggggagccaccggaaccccctcattaatccacagacagccatctcaggacttcatgctaagaattcattgtttcccactttcctgcatttgaacactggagggcaatgctggaccagccaaagcactctaggtgctccgctccatctttgtctcaaccttgcctgtcatttcaggaagcagcctctggttggaagccaaaaccaaggaccagtggagcgcccataggctagcagaacagctaggtctattacagcatctcccccacacgggatcataggaataaaaggtagctcacggaaaagcacatctggtttcatgggtgacacaatcccctgggaaagaaactgagcggggtgcttgcctaactgtgtcattaaccagaaacaatctgtgtctctgactaggggatgcagattcctacctgtcttcactcactcagatgtaagcccctggagggtaatgtcttagtaaggtctgcattcctgtagcaagcacagtgtttggcaacaaatacttgctggatgaataaatggatgaatgcgtgtatggatacatatgtataaaatggaactggccattttcagatttgttgttgttttctagctcttatgacacccaaagtttaaatcattaatcagttgctgagcattcttagtcttaaagacaactaaggatggtcaggtggttaattaaatcagtggttgtcattgtacaaatgttatttcaaacaccacttcaagagtttcaggtctcttatttttaggaagtccttcattgtgtcatccatgtgtcctcagacctcaccagcctgtggattacaaaatacagacactatttcattaatattcaatttacaagaacctgcgggctcatcatgtggaatattgagtatccgtgatgtccccaagtgatttgtgggcatttcatgtgccacagtgggtccccacggggcttgacagttccatggagccagagctcttcttcaggccatctttcatcatcttgtgagacttttctccaggctgctctcccctctaccttcaccacaatggatcccatgtcaggtggacatggtctactctcttaatcattcaaagcactgctaaatgtttgaggaagaaagaagagcacattttgagacccaaaacccaacttgagactctttctacctccaggcaggcttacgcatagcaaagaccagctcaaggcgcccggtagaagtctgcaggcatctccatatctccaagtgcagagagcagaggagattttttcttctcagttcaagactagttcttttcctgccctgggatgattgacagtgagaaaaaacatttcctccagggaagcgctctacctgcccctccaccttctcagacggggcccgaccttcatgaccctgacaaagcaaacctggtgctcaactgtcttattagatcttctaacactatgtgtgtgacatcaacagccctaactaaattcacacttgggaaaaatatgcccctcattctaactaaacagacaccatttaattttcctaacagaacacttactattttgacgcacgacacctgttttcagttttatgataacttcataatctccaatacaatgagtgagtgtttatttgaaatgagaataacctcattctcaactagttttctcaacagaagaagagtgctcaaagttcatctagggtctttacctacagaaattcaatgctgtcagcaatcttcaaggagcagctctgccaaaggaaaaagaaagaaagaaaaaaggaaatcctgcttttataagttatccctattattaaaatttctaacaaatctctccctacagttcaaacctaggtccccagagtatatgggcctcatccttctcataaaaatgctgttaaaaaaaaaaggtgtcctttgacacctttcctgagtgcaaacagagattgaaaaaaatcattctaaaataacatttttctgtcactgcccaatgggaggtgagttgatcataggtgaagcatgtcctattagtatgtcttgctcaggatgcctttggtgtgagtaagggatgggtttctagggcaaaatctctgttctatacccgcaaaaaacaatgtacagaaatttccctaagagaggagattggcagtcaatacataagactccataggcaggaagtgtccagggtcagctccctgcattcaaatacagacctgcatcagggctgtgatttccaggtccaaggctcggtgagtggataatgcctaaggcctgatgccaggcctgatgtccaggtttaacactgatggcaggccacagaccctcctgtcttgggattccaaaaagcccagaatctttcccagttcctactgacactaacttttgcccgggcaagaagtgtctgagattgcttcccttgagaccatagtcctttcttataattccaaaactaagcagccctgtttatgctgctgtggcagagcatggaatcttggttagtccttccaaactgcacccattgggttatccctggggaaatgatcacattacgttactttgttgaacactgaggactccaataaggactgtgaatcccaactatttctggtgtgggagccagggctttcaggtcattcaccagaaattatccaaccagaaaactttctttcaagttctgttcaaagtccagcagtttgcatacaggattcagatgagacttctaagaatcatctgtgtcttggatagagcaccctggcagcctcttgaaaatcaattccctaagaaacctatcttttagaagtggaccttcacaaagccagtgagagaatgggaggagtatgtggtttccaatgggagacatatatagacttttatgtcatgaatttctgaagtcagaccgtgacaaatgttggtcagagtacaatgcacagttgcccaaaggaggggaaattagcttggttcaggaggactaggaaatcctccccatggaagttttagttaaagtgacttaaaggatgaatgattttgacaaatgagggattggagaaggacatggcgggcagagggagtacagcttgagcaatgtccaggagggatatagaactgtgcttggggaacagtgatcacttggtgagagttgagtctgcctgagttggggcagtggagtggtgggagtggtgggctgtggcttgactgagaaagcttttgtgaatcacattaagggactagattctgttatatgggaaatgggcagaaatcacaggcatataagaggaaatgtgcttcgaagagtgcttggaaagattactatgggtgggaagactggttccaagaccggaaacaatgagatcagatgtaaagttaatacgaaactgaggtagacattgagaaggatcagaaggacttggaaagagaaaacagatttaagaaacacctcaaaaatagataaatgatatgtgggaatgaaagaaaagggagagattgtctcttcccgacatcctggctatgtactggaagattccctagttcccaagccccaaggtcttaccattagaaatcagtccttactcatttgtccattaaggcttaaggtgtcaatccttccaggaatgcttttatgtttctatggtccaaaggcttaatctccagtggcagaatgccaggtaccaatagaggagatttgggggcagtggtcttctcgggaccctcaaaaatcattacatagttgcccactcctcttatttataaagctgttcgtgtgaataagcacccaactactttgtctgtgcccatttgatcactgattgaataagaaataaaagccaaacatctatattctttttcttctctgaataatcttttcccctgtcttcagatttggaacaaggaaacccagatccagggaaaatattctaaatccttgacctccctatccagttggcactccagcccagtaaaatggcttcaagtacaacattcccccaacagcgaagacagccttcctgggagtcttgggtaggcctgtccagggccaccgtgcagcacacatacatcttcccaaccagctccactgtcacaaacaccatccacactgccatgggcaagcctctggccaccaatgccaccccacctgctctggtgtgggcacacctacagccatgccaccaacactcctcgtgcacatgtctatggtgtatctgtgcagtcacagttgtcaccagctcaattctgtgtaaccctaagtccaggcatcttggggtgaatgtctccttattcctttgtccattgtcctgctctccctttaaaattgttcatgagtgtattttgcagaaagatatgtgatcttgaaagacagagaaggaaagagatgaagtaggagagtggcaggggtgggggtacagattttgagaaaggcaagaaaaaagaaaggttccttgacctccatcagtcccaactcccaaaataagactggccctaaagatagcttattatttatcccaaattaaaattttatggctctgcaatcattgtgtacacagtgaaaagaaaaccatcacacaaaagatgcagttatcctcacagtgggaacaatagcagccaagctgattctgctccaagaatagaataacagtgctaagtcaggaactccaaaactttgtcaacaaatagaataatttcttggtgggaaaatggctatgaaagaaggtgggcaggaaagcaaccttctgactcttgaactgggcatgggttgccagggaaaattccagccttggtccctccatagtgagctcacaaccagctctgctgactggggaaaagtcctgcctgaatatgcacagactccagaaggccctcaccttacccttgcccagaatcatatacagaatctaacaggctgtacctgcttctcttgcctaaagttatgcatcattaccagatttccagctccatgatggcagaaatttcagctgatttttttttccattgtatcctcagcattcagcagaaggtttgtatatacttggcactcaataaacacttgctgaatgaacggttgattgattaatcaattaattgattaatttaaaatgagcaaaatactttctccctgtctggcttctgaagagtgagtctgagtactagaaactgtcagataggcaatagaagccacagtccacttggaaaaatgactgtttctacctttgctcatccttctgggcatcttagattcctgaaattcaggaacaaggacccaagagatcatgacccaccaagtgtctttcaacaaaagactattttcctggctgtttcctttcagagaataagcctcctggggctgataagcgaatggcaccatatgctgaaaacacaggccctgagtggcagagggcaccagagcctcctctgaggagcctgttggattgcagcctttcaacaaatctgagtgtgtcttttgatagcatcagcatcaaccacccccaaggacctctttcttttattgcttcagcaatgaagcaaccacatggctgttgtagataaggtggctcaagtgcattgtgcatgcaatgtaggctgctggtgcacagcactgagaatcgcagacacgccgtgtaccagcttctctacactgcgttgcccttcctctgtaagtggcccccaggtaaacgggtgtgattccccaccacttctcatttctcattttctatcatttttttctttgccagatggctcctgcaagactgaaatcacacagccttccaacatggccacaatgattgggacagatgtcaagttccaacgctaatataacattcctgatgggaattatgattctttgtgctggcatctgcaaagagctaaccaaaggtttacctatatctgctatcctttcaaggcaccctggaatcagagcactgctagttgtctgtggacagaaaattgttctccagaacccgaatccttaagcatgtgcagccaagagactgagccatttactgctgtgcactgtgggcaccattatgcatgctggatatcacactgaacaaacactgtaagcctcaagcagcctcaacacagaaaattcaaaagatccaccaacaacacacagggtgtttagtgtcatcttaaacttgcatcttgaatgcatcatcgattcattcattccaaactaaaagtcccttaaggctttcaaattgatgtactgagtattgtgaaggataccaacatatataacaaacacttctcaaataataaaatgtattcagcaggtacaatctcctcacttttatgttgctaaaccatgagaaattaaaattaaatcctgtataattacttgaatcttccagctgacaaataaaagtagtctttgatacacagaaggacaaatgaattgcacacacatacaaaattaaggccagcaattaacatcttaatgacatacccttaacttaccaacatttctaaaagcctggaaaaatattaaatatctatgtatacatgatatgtacagtaaatttatagatagatgatagatgaatggatacatagacaggcaagctgtaagaagcatcataaaaggactgagctcaagttcagactttaaagccagacttcttgagttttgaattccagaccttccatttactgactcaatagctatgtgaccttgggcaatttactttttgccttgctttcctcatctataaaataatgattacaataacacctacctcaggggattgttgcaggaattaagtgacctatagcacatgttactgtattcagagcaaagcttggaacatgaaaagcactcagtgagtattaactacttttgcttttgagtgtgataatatcctgaggatgattactaaatttcccctgtgttgggctgggttgagcctttaggaagttgttgataagaaatgtcagtctcttgaacaattaaacattattttctacattagtatcctatctagtaagaagtaaatatcaatggaaattcagagaaatacaattcaaaaggccttcaggacctttttcctggatggcaataaattattgagggcttcctatgtagaaaaaaaaaaaacagaggaaagtaatttctgcttgaccatcataaaataagcaaatataggctttgcgagatattaaaatacaacagtaaccccactcattaaatgaatagaatagtggaataatgtataaatttaaagccaaaagtaaaattaaagttgtttatgcacatatttttgaagtaaaatatttgtcctatcaacataaaaggcatagtagatgacctgaaaaagtttccacctccaagaagataacaaatcaagtcaaagtcacagtatgcctgacgttgtgtcatcctcaaaaactgggaagtcaggatcagtccaagactccagaagtgaggaggctctaaaagacacctccacttcagcctctgcttattcaaggccccagccatggaaactcgatggtgtgaactgctgagctgagaactgggggtaagtgaggactgtcttctctgttttcttttctgaagatgcagggtctcctgctaattcggattctgtgttttattcattagtgggaacacaaatcccctgctatcttgctagctttctcatttgcagccaacatatgggtttatcagcacggttagccccccaagaacagcccttcagggacatgggataacacaaaatgggaaattcttcttggaataaagagttggggaaggatcctttgtaaaatttggttttggggtcagatttcaaagtcttaaccctcatgggacaggcagagactcggggatatttggtgagtgactgagtccctattcctcctgagcttgcccttccccagggcacctcagagccagaactgctgaatgttaacatggggcactcaggtttcctacaggacacttacaactctggtaaccctgctgtatactctgccagtaaggaactacttagtaattcctccgagagccaacattcaaagactaatgccacgtcacatgcaatagggaaatgcagctctatctgtcattcacatctctgattctgtcattcattactccatgctaaaagtcccagtgggagaaattgtctttcttctttttcaaaaccagcttctactgaaggtaaagaaaagtttaggggtagaagaacaaagtcattacagaaccatgcattgattggtgagcactgcccaggggcaggttttgtggtaatgatccataagaagcaagcaaaattatggtggagtcgatggaatatttgagagtctctgccccaaccatctcataatcgaactgggagccctccaatctccccatgcaagccttggaggacagtcatagaagaaaaagtgagcaagaaggtttaactagctaacaagtgttcatcaagtatccataaatctcagggtacagaagtggcatttttgtattcaatcatgtatatattagtgtttgctatgtgctgtatcccatgccaagaaccaagccttcttccactgtgtaactcataccgtagcagggcttacagtctaatagaggacccaaatcagatgcttgtggaaacaagagaaatacttggttgtaataattatgggggtgttccaggaggaaagtacagattgaaattagaatatttcaatttcaggatgagttaggtgatgggagccaagaagacatgctaaaggaattaaatcctgagctgagactagatatgaaaaagtttgtttatttacatcccaagttcccaagtcagtaacagaagcagaattacaactcgagaaaggccccacttgcttctatgctgttttgctcagcagctgcttcctttggtggcacacagctgggaaagtgagtcacagatggactattggcagccaaaatttttttagagacaaatgacactgtgatttttcctgacacccattgaaattcctcactaatttccaaaaatatcttatgttgttttaaaacatccagtgaggcccagacatttcagtagaacaaatcagagaaacgaagttaattccagccatctgagcattctgagcccaaatcagctagactgagaagaagaatcgtttacttaccgaaggcagtcccaggacacccagcagctaaggtcctgactcacagcattctaaccaagagaaaacacaaacacagcatcttctcttttcattcacttctgttcctgttcttcagttgcttgtccaaccagctggagacacagcagagaaaccagaaagcaaagaaagcaattaggaacaggagaaacagctgataagcactctgcctaggtagaggtgaatcctgggcacccatcagggaaagactttgccattactaaggctttaggtgaggagtttgagggttacgaataagagataaagcaaggaaagggcttttctttgccaaatttatctttttttcacccataaaactcaaagaggatagggaaagaatgaatgtattctcaaatcaaaggaaaaatagttctaaaacttccaatgagtgagaaaatcagaagttctggcactgactcccatttatattgaagtaatactatgggtaaatattttatatcaaagaccccagagtggcagagaccatcagagaatggcattaaactgggcacgcatagtagccgatatggggttaatttgatttgaccttggcatcttttctcttcttaaagtcctcccatcctttctttatcctgtatagacaaagaagactggggtctaacttttatgtgtcttccatcctaagctgccagagacagtcctttgccaaagggcacagtagattgatactgcccatatgtctctgacacggctccactcagctcattcatttatctacccaagtcctacggcagcctaacatggctcaacagactgctgtttccctcagaggaatgttctgtgccagccttgaaataacaagttctgtgtctctcctggtaactatggctcaggcagggggctatgaccaggtcactaaccccaccatggcaaagaagaaaagacaaggcaaagaagccaatatctgtggagggcttacaaatgagtacctggcacaggaataagcccttcacaagtgttctctcatttcaacctcacagcatccctgcaaggtaactataattaccccatttgcaaataaggaaatcaagactcagagttgtaatttgtcccgctactggtaagtcacaaagcaagattcaaaaccatgggctagtagacctgcaaagtcagtgctccatttacatgtaggtaatatgggcactgataccacctaggcagtgagccacaagctattacaagcaggttctatccaagtgggaggaaccttgctctaggtacctagcaggttctatccaagtgggaggtaccacctgctgcagagtgccccacttctccctgcacctaaaacagtggataaaagacctggatttcccatgttttatcctgagttgctggcaaattctttcctaatctcagtcttcactagataagcaaccaaccctcttggttccttgagagttggggcgtctagaaatcctgcctggactagcaaatatctgtgagttcctaatattgaccagctctgcactggacattaggaatgcaaatataaataaggtactgtttatgttctaagtactcttaaagttcaatgcaggaaacaaacagattatcagagaatagaggtgataagtgtcatggcccaacatggcagggggccaggggaacgcctccctcaggtggagttaaagaagggagaagaaggatggtatggcttttccaggaagaaggagaagccagtgtaaaaactgagcatctggaagtctatgacacatctttgaacctgcaagtattttatgtggctaaagtgttgaacacaacactttcctacatctaaaatgtgcaccacacctgagatgaggctgcccgatcattccaacagtaacatctgataaaagaggccaggagttgaagtgggggcaaggggcttatctttgcagttggcttagaggggccttctttatcagttgaagagggcaggaaaggctgttaggatttttgtggagagatgttgggggtggggggtggggtgctgcacctgtctctcacaggctcctgaagaaaggttgaaaataacagcttttaatactgaataggccctctcattgtggaggcaggctgagataaacaggacttttactatcatgagtgctgtagctcattgcagtctttattgtgaaagtgttcatgtgcataagtcagataaagcaaggatggttttccattaccatcctaatcaaaatttccaaagcttttagagatagctttaattcttactctgtgaagaaggatgaatagagtcattttctgaaatgtttccacaactatttcaggtattgagtgttttatatcttcccttagctgccgaagagtcctggggatccgtaggggtgagcaggaaggggaaatgcacaggcttccttcatgccagttgctgagagagagcttagagacaaatacctgtggtaatgtggaatttctgagttgagcatgggtcaactaaattaaaataaaaatttttattcccaagtctcaagttgaaatgggtaagccaagaaggtctgagaccgcagggagaaaactcctggaggaatccactaaggagacaagtaggcagaggcgcttaaagatacaaacattaaacactcacccagggaatgccttcatcctgttggctctctttgttctgctcaaatatctgtctggcatcctctctccacctaaggttaaaaatcgggcattaggacacagagtagacataacgtaaaaattacaactaaaagtcaaccctcctgatatcttctattcaacatttcttccagtgcactattatcttcatcacatattttttatagggtacttactgttcgtggtattggaatgggtcatgggaatagcaaagttctaaggcaagttctattcaaagttctattctcaccaatgtgttttccatttatttttaaaagacagggcattagaaagtacaattaaagattacaaagaatacaaaaatataacggcacatatgataatgagggttagtgatttcatgtgcagtgctctaggagtttatgaaaggaccaattgctataagaaaatttcttaggttcgagactgcagtgagctatcgtcacatcactgcactctagcctgggtgaaagagtgagaccctgactcaaaaaaaagaagagaaatgttttttaaaaccttttttgcttttgtaaaaaaaatttatttgtatatacttagtgcaagcgcaaatttcttacttgcatatgttgcatagaggtgaagcttgggcttttagtgtacccatcacccaaatagtaaccattgtacccaataggtaatttttcaaccctcactcccctcccacctcccgacctattggagttttcagtgtctattattctactctgcatgtccatgtgtacacatcgtttagcccccacttataagtgagaacacacagtatttaactttctatttctaggaaattttacttaggataatgaccttcagttccatccatgttgctgcaaaatatattatttcattctttttcatagctgtttagtatatataccacattaagaaaattgtcttagaatagctgaagcttaaaagaggcaggagttggataagcaggaaggaaaaggaagggtatttcagggtgggtatactagttatctattgtcacatacaaatcacttcagaacttagaggctcagaacaacatttattatctcagtttccgtgggtcaaaaaatccaagtgtggcttagctgcatcctctggctcaaggtctctcatcaggctgccatcaaagtgttacctagggctgtagtcagctaaaggctcaactggaataagatacacttcgagttcactcatgtggatgttgacaggctgatatggtttgggtgtgtgttccatccagatctcatgtttaaatgtaattcccagtgttggaggtgggacctagttgaaggcactggttcatgggagaagatcccttatgaatggtttagctccatccccttggtgatgaatgagttctcgctctattagttcatgagcgagctgatcatttaaaatgagcctggtacctcctcctctctctctcttgctccctctctcaccatgtgacatgtgcccaggctctcctgccctgactacagagaaatggacattagatgtggtcaaggcatctctagagcaatggttctcaactctatccacatatttgaatcacctggggatatcctttgaaaatactagtgtctgggatacatctccagagattttgattgatttggtgtgggcttgaagctctggcttaccagatgactcaacctccttcccctcctcttgctcttccctccccctggggttgaaagcaactggcttaagaccttgctattccaagtgtagtctagacaaacacaatcagcatcacctggaaggttttgagaatgcagaatctcgtgcaccatcccagatccactgaatcagaatctgcattttaaacaagactccccaggtaaattatatgcatattaatgtttgagaagcactggtctaggcattcgtcattattgaaaacgttcatggaggtaaaaaaaaaaataaatcactctttcccaaatgtcacccaagaatccatacttgtaaaaaatctcctgaagggatactgatgtgccgccagggctcactgataggcagtcagtcatccccagttcagtttacagattatttgtgttactaccaatataataaatattcttattggggtgatagtgagtccttgtatgcttcttagaggaaggtattacataaattctaggttttatcatttctcattcatccacaagcaaataaggaagtggattaatatttactgagtcaatatactttttaccacaccacgatggattatccatggaaacccagaatcttgtgccacataccttcaattcaagatcaagccaaaaaaaaagatccacaaattattggtgtctgattaagtctgattgggaagaagaggaacaggagacacaagaatgtgtgcgtccagtggtccaatcctgcaggatgaatgaggacatgaagttctggcccgtgatggattggggtaatgtagaaccagaggttggcctggggtgagcatgaaaaatagcctagagacaaggaggaggaaatcctgggagaaaatacctggactgcccaacaatctgagggtctgcgcacaatgaaaaaagaaaccagacaaaaattaaagtaaaaaacctggagaaatttaaataattcctgtgcttactagcaggtaattaaggaagcattttatgtaacatctgaagcctcagatttagggggagacagggccactgaaggccctagcatagtaagggcatggaccaagtttctctgcagaaatcccgaagccaaatgagcgatatgaacacccactattatttttgtattattcattttctttttttctttctttctttttttttttgaaacggagtctcattctgtcacccaggctggagtgcagtggcgtgttctcagcctaccataccctcctccttccaggttcaagcaattcttctgactcagcctcccgaatagctggaattacaggcacccactaccacgcctggctaatttttgtatttttagtagagacggggtttcgccatgttggccagtctggtctcgaactcctgacctcaggcgaatcgcctgcctcagcctcccaaagtgctgggataacaggcgtgagccaccgtgaccagcctgtattgttaattttcttccccctccactggtaaggacaattgagagttgactaaattcttattattgttgcctccactgttctgctttctgtgattcttatccatcatgagaagggctgacttggaagagttcagagcagtgaagagaaatcccagagagtgtctgccaacactcaaaaagactttgaatttgatgtcagaataggaataggcttgccactctcaccagcctcccaagaagagtcattgggcaggctggatggctagaaaaagaagatacctgtctgacgcccaaaggcagctagaaggcatcctggcttcaggaacagtgccatcacctggctgccctcacaaagaggtcatccaacattgtgaaaccatgactatgagtgaaaggcaagagaaaataagggaatctgaaaccatgtgaatatgccacttcctctgcatcacgggacaccagagacgggcaacgaagagaatgttacttctatcatataacacattctcgattcggaaggtgccacagccttgagaaagtcctcattacaccatcttgaaagctctcagggatgatataggtagggtccaaataagaaaatggactcaaggaaatccaaattgtgaccttcactttgaacaattaaaattttaaacagaaaattagaatcgttgaatttgaaatccagaaaggatcttaaaaacaaagtaggaatcccctcattcagtttaaatgttcactaaatattgaatgagtaagtgatcacccagcctcaattcaaatattttcaatgacaattcttgtttcaaaaaatctgtcctataccaaatcaaaatttgcctcccataacttcatatctttatatttgttatgccttccagagcaacgcagactaagttcaccttcgcatattcaaatatttaaagatagctatcctgtataaccattcctcatgactgtctaataaattttaaactccttgagagaagcatccaagttcaatatattttcctgtaccaatgcaattcttaatagagtgactcatctgtagcgggtagtcagcaaatgtgagttgaatacatgaattaatatctatgtgtccacctgaccaacagttctactcgggtgtctcaaaggcacttcagctcaactccaagacttaaatcaagatcttccttgcaaatatggccctagcctaagattccctatctgaaggaataacaccatcatttcaaacccatccactgctctccatccactgccaccagccaggtcaaaactaccattttcttctttggattgtttctatagccttttgagtaagttagccggcctctggtactattcagtatctcctccccacagcagccagagtgatctctccaaaatacaaatatgatcatgtcatgcccctgattaaaaatccttcagtaacttcccattgcagataggcaaatgaccaaaatccctaaaagtcctctaagaccttgcacagtctgactcctcacctcttctgccatacctctcactcttctctccctcattttccaaacatgccttcttccagctattaaatacttgaatgtaccgggtgccttcccaccccagggtctttgcaacacttctcccactcctcatcccctgtttaactcctattgaaaggagttaaacaaaaaagatcaaagcctacacatccgcttttcagaggcatcttgagatctcctaacaagttcaggttgtttattctttaacgctttcatatatcagtttgtaatattttattaatttgattatgcctattttctcatgagtctgtaagctctggagatcaaggactatatctgcatttgcttattcaacctgacaaatcgcataaacatagctgtgtgaataaatgaatgaatttcccacattctgggacttcccagaatttgatcatcatcacagactctgggctgcagtggggcctcaagccttgccatattctcactttttaggggtctcggagactccagtgtcatcctgagctggagtccaaggcttcttagaaaccactgatttctactcattctgtctggcatactcaagagcccattcttgggcacacaggacaactgaacaggattggagggtccttcataggtctgagccagctcccacatagggaccctgaacaggtaagtaaaacctgcccagagagtctagctagacatgaagaaatcagaggggcccaaaatgattattattttctcagtgactactggctgggcttatgatgatccctcttggtgtttttcattttgcatggctattttcagtagctgtatcattaaaatacacaagtctataattatggggatgcatatcctcatccctcaaatatgtactgagcacgcacaatattcctggtcctgtgccacacgctcggttacaaaggcagccaaagctcaattcctgtcctcaaggtgctcttcctagtggaagaaacagacatgaaaatagaaacttactaacagagaaaggagcaaaccaaacacagagaaggaagtgatggcctagagatggggagggcgtctcagaggaggtgacacgggctcataacagaaaaagcacttgtttccccgaggtaaggtgtgcttgcaggttccttaagatgacccaggagggaagatgagcatcctcaacagttacacacaaacacactcaccttcatctctgatgcttgcagtgaaaataaataactgaaaataggcccaacgtgctgtctcatgcctgtaatcccaacactttttttctttgtttgtttgtttgtttgtttgtttttaatcccaacactttgagatgccaatatgggaggattgcttgggcccaggagttcaagaccagcctgggcgacaaagcaagaccccatctctattaaaataaaaagaaaacataaaatattgaaaaacagccaaaaatatgctgaaaaccaccatggcacatgtatacctatgtaacaaacctgcacactctgcacttgtatcctggaacttaaagtaaaataaaaaatttttaaattaaaaaaatgaaactaaataaactgaaattttatggaaaaatacaaaaccccagactagacacaatcagcttctttttgtgggaaaatgaatttatatcaaagctttcataggggttctataaccacagaatgtagttagttccctgccaagtaaaacttagatacttccaaaatgctgctattgtacacaccgcagaacagagcagccaaaatggtagtggtatgggttgggaagataaagaattaagaaaagtaaagtggaaggggagaggaaaaggagaatattatttccttgaatgatgatcactccttttattaataactttctgttcttattaaagagatgtcccaaacctctgggctttcccagaatttggtaccactggtgcactgacctatcctcatcctgccaatgtgaggaaacccagagagactagtcaaatcccctgcagagcagcaaccacgccagtggggctggctgtgaactttcactttggtgtgttctttgatttcatttggtgtgaaatattgagatttctcctcagatatcccagcgccttgtagctgcactggatctataaatctttatctgggctagattgaaccattttcatttatggagttgtttttaatcagagcaagagtaaaacttttgccctgtacaaaagagtcagctgtaaactgagccattctgcttcagctttcagcttctcctctgaagttgtgtctcttctgagagctctggaataaaacagctgccatagtcatctcacccttccatattttcctctttgtattagtcagctctgctatggtaactaacagtgccaggacctcagtggcttacagcaatgaacatttactttttgttcccacttttactaccaattggctgctgagctctgctccctctgtcttcccattccagagcccaagatgaaagataagccactatttgggacacactttttttttctgacaggatctcactctgttgccgagaggctgaagtgcaatggtgcgatctcagctcactgcagcctcaacctcctgggctcaagcgattctcccacctcagcctcccaagtagctgggactacaggtgtgcatgccaccatacctggctaattttttattttattttattttattttgtagagatggggtttttccatgttgcccaggccagtctcgaactactgggctcaagcagtccacctgccttaaccacccaaagtgctgagattataggcatgagccaccatgcccctccacactgtttttatgacagaagaaaaagaacaagagaaatgctagcagaaactccagatacttcttaaaacttctgctcagacacagcagacattatgtccactcacattcatcagccaaagcccttccatggtcaagcacaagatcaactagtcggggactcacacctttcctgcagaaggcactgcaagacacatagcaatgggtaggaagcaataaccctttttcatggaaagaaggatcaaatacttcagaataataattataacctaccataccctttaactccacccatgtaatttgtctccatcctggggagtttctcctgctgtcaacttaaaaggaatttaaaatgattttttttcttcttggaattcttctggggcaagatttgcccaattattcttcagaatgtcaccatccctcaagatgttaacagtggttgcacaatttaaaagaattccaccatcagataattttggcaaatgctacatattaatagcctcctcttaatatttacaattcttattaccatattaaatgctctgagaacccctgctgtaaagatacctatttaacgtgggattggaatcacagaattctttttgtaatggcacagccattaagacttacgaaattctataggcaaataccgtcccaaaggattacgcaggattcagtcagatagattcctgctgtttcctcatttctgtgcatccagactgaaggatacctaatgacgttgagaggagctatgcataaggccaatgggtctgtacaggcctcaaaaagaaggcttgcattttttgctaagaccaaactcaatgtcagaaacctgaaaatgttattcagatactactctttgtctactgaattaagtataaacacttcagactgtcttttgctccttcctttctttctgcaacaaacgtatcttgagtcctactaggtgccaagtactatgccaggcattgagtacacggtatgagcaaaacagacatgcaccctgccctgtggacttgccagtttaaaataagagagacagacagaagacagggatatgagtaaatagccagtgatcatacaacctcccagtggttagctacaccgttggccacccattcctccttgaaatgctttccacacttagcttctgagatgccactcttggctgattttcctcttcatcactggcttctccttctcagtcccccttgctggctcctcctccactacacagcttctaaatactaaagcagccagggtctatcttctctcctctatctctccctagatgatctcattcaccctcatagcattaatttcacatatgtgcccatgactcccaaatttatatctccagtgcaaaactctcctctgaggatataatcttcccccaattgaaccgccttagcacttcccactcttgagttatttcatgtgttttctcttttgccatgattgttttcatacttccttcatcctcttcctgacttataaacccctcgaggcggggatccttggtctgtttcatcttcagtttccgtagtgcattgcagagtaactgtttaatatatgattattgaatttaatgtttgaactgaatttctgctttagggatcactgagacacagatgtaatgaaagggaatattttatttaaagaaataatgcctcatccttctgtatttccaaatgaacaacctcaaatgagagaacacagctacagacattagcatgaggtgaatacttaagtttaaaaatgctaaatcaagccagtatcatcccttgtggtcacagcagctgctgctgcaaaggttttataaattgcctacattcccgcaccccatctggcgatgctggtgtgttacagccatggatgacttactcttcacaatagccttcacttggatctattccctactttaaaataaaaagacaaaaagaaggtgccaaagggcttgcctaaagtgctcccacccaacaagagtacaattcaaccacataatgctgcctcctcagcatttagaagattagattcagggccaaaggggaggtcagaagaggaaggccccctggtttgcagaaaggtgtttcaccatcagttctaataatagcatgtggcagctgcacttctggtccttcctctgcattttaatcccattattttctaagcctctcccaaggcctcctttaccagtcaaaatcagccaaggtttcatatgcccttagaagaaaagaggactgatagaacctaagtatcaactagagaaaagccaagagcttttcgtgctggatgatccgtctgagtccgggttcctgattgccacacagggaggccctgactatagtgtggacattggttcctttgcatagctccctcttgtgtatacacagaggctgctttttctcatcttgtttgccctaaaacattttttgacttagcctccacatacttgaaacttagagtttaacctgtcaaaatcagagggaaattgactgaattgcatctctttcacgaaaacaaacatcttccaactgccatggcattttagactgccctttctgctagtgttgcttccctattgcatttccctggataaacatctagtttgtgccataatatttattaacaaggagtcctctgggcagacggtggcattaggaatttctgcttggcatttggtatgctgtccagctgagtccccaaccatgttgtgagtcaatgcgaacacagcaggtttcaataaaggcaacagttatctaagcaggctgcagccgtgactctcagctcagcctctgggtcaccaatctgggacgtgagctggcacctcgttaaaaaaggtattctgacagagagatggctgtcagtggactcttccaaaaattctctttccctgggttcttctagtccatctccttggcatgtgccattccctatgcatcttttgttagactacatctctggtttctcaccacagcctggacactgctgatgggctagattgataccgtatgctttgtcatgcaccgtgatcccactcacaatgttattccagtgggatagatgctgagatggttcaccatgcaagaggaatcgtgctgcacgtagtattttctttgccctcctttggtaacttcgcaagttcccacagtcactactcagttatgcacgtgtgctaactcaggctcagactactttgcgattagagccctgccaattggatagcttgtatttctattcaataatcttttcattcactcatactaaacattcattccatagctcaatgttaagagccctttaacttgtcatatacatgatgactataacagcactcgcattctaagctaggctttaacacagcgctacagtggtgattatagaacagccactctgaactgcggcttctctagctgtggtgaatgttataaagaaagtgtatttactctagtccttgcccttttaccagtccccacacactaccaaactcaatataaaccccacataaccagcaagaatatctgaggtgtgcaggttatggcaatgggacagcagcagacgcacagtgggtgaggttcctgggacatgaccaggacactggtttatagtggcccaagctgctgtaagtctaagatcccactcaaatactgtactcactttcccacttgatggtttaggaactcttttctagcccccaaagctacattctgagccactttttttttaaacctacacagctgccttcccaaaagtatcctgcagtaattccatgttcctcctccattgtttcctcgttagctctgactccatgttctggcaatctttcagcctcattcctttttcctcccagtctgtaataaaactaagcaaaaggtagtaggtatattagctcaagaattgggatgtacctgtggaactgttgcgtgatgcaagtttttgtcaatgactatgggagcccctggcacggagggccgggcccaccacccctctcccaagggaaagaggacaagtccccatccatctgtcttctcccctcctctggcatcatagacccaccccagtagatagggtcatctcactgtctcccattggaggtggagtgggggagggtctcactcccagaaatgctcctacagctttctcctctcccttggattgaaggatgaaaggtagttatttgcttccccataggggatgaagcagggagtttccctagggttctgggagggcccacccttgtcaccaccctgtggtgccccaggggtaatcggccaactgaaggaatgtaagatctatataataaaatcttaattccacagaagtatgattccagccacaaaatttaagctctctatagacactaaacactctacatttccataagtcccaccaccaaaggaggagaaaagagcatttatattctctctaacactgcgctatcccctcagcctactcccaaccaagaatcttgagcaaaattctttgctccacttcagaggaggaaagtgggaaatgttttttcctgtgtgcagagactactacaaagagggaggggctcctgttcgggcccatttaaactaattttccatctgctcccaatccaggtttttccagttttacctctttattgggatattgttgaatggaagcacataattaccattattttattttttataaatgggcttctacaaacaaaaacacaggattagtctattattagcatgaaaacctgtgccgtggcttctctgagttctacctggggaccagcacacccccactgtcttccagcgagcagaacaaatcaaagaggatttccagagacagcaataactttacattccacccactgctctccctggggcagcaaatcttcactgtgaaatctgcaattccaggagagcagaaagcaatctatctccctccaaaaacaagttgccatttcagggactggacacattttcactcctaatggtaggtctccttggattactatggtctgccatgagcctgggaattgtaagacaaaaacagaggaaggaaggaaggaaggaaggaaggaaggaaggaaggaaggaaggaagggagggagggagggagggagggagggagggagggagggagggagggagggaaaaagaatgcaaagttgaaatatagcaagaacccattactctatgagtccagtgcgctacaggctgggttccatctcaaacacacacacagtgatgtcccaatgtaaggaatcccaactgaattctacctctcagaagggagctggataggacaaaatttctatctgaaaggtcagagcaggattaggaggagaaaccaagaacacagacttagcccatttcaactagcacagaaggacccagaatgccaggtatgatagcacctaacaaatatttactaagcacccactaagtgcccagcactgttgaaagagatcaagggaacagggagatggttggtgctgacctaagtttgtaagaagtgagcaatcaccaggcagcaaaggtgttgggggtccgcgctggtcatagagaaaggacaaggagcagaagactggccgatcccaatgccacagcaggccctatggtcacaggtgacacctcttccttgtcccctcagtacaacagtgtataagcctttactgtcctacaattcttctttttgttacacagtggctttcaaccctggctgcacatcagaattatctaaggaagttattaaaatcctgttgcccaaaacccaccccagactaatgaaatcagactccgtgggggtggcacctaggcttcagtagttcttaaaactcccccggtggtcccagtgtggggccaagattgaaaaccattgcatggaggtaattgtcctaattacctctccagcttttctctgcctctacattcctcttatctaagctgttatattgcctttttatttttagtttgttctactttgtcctttcagtagataattctataatactccattaaaccttttttcatgctttaactttgttttttctcatttaattttcatcgcccactctacttactccctcttcccattatgtttgttttgttttgtgttttctttaattcagcatcaacatttgcagggcacttgatatggacagagtacggcagcaggcatttaactgctgctaaaaattatatttaacgcagtaatattttgtgttagatcctgtgccgtggctacaggctcttgtcttatggaagattggcactttggcttcttccttggaagtagctgcattgctgtataaatttaagatccaaaataagtatattacaataaaaaataaaagaagcatccacaaatatgagggaaagaagcattaacagcagtctgaagctaaatatcaacatcacccctgccaagctcttggcctcattgtaggtggaagacgctgccatgtgcaacaaaaagagaaagggcccaggctgcatgcacaactaacgaggctgttccctgaggaaagggcatttgctgatttagactcatttcctcaaggtcctcaagcaagcccaagagtacataggccagtcgctgagacactgaaagttgagatgtggaagaaagggccaacagactgtcccagaagcagaatgcttcagtcctccagggaagctttgggggagatctgccctcgtgtcctcctacagctcagctgagagcagccctggagcctcagaaccacaggccctgtagttccctgggtctggcaaacccctgggagaacaaatcactgtcctccccacagagccagcccagcactgagaacaccatacaagccagaggatgcttgccaaatagatgcatgaacgaacgaatgaatgaatgaatgactcctctgatgaagttgtcccagggagagtttgtgggaatactgaaaaggagggtggtccccaagctggtaccccagtccttgatactctgatgtggctttttaatttctctgtcttccttttaccttgatgtatttattctctatcaatctatttgtttatttatttatttactttaggaatcaagccagacaccttgttggagcaacaagagctagagatatttgttccttttagaagaagcaaaattttccagtgccaactgacagggaagaagatgaataattacactatgtcctggtaaagaggacccgagacggcttcctgattttcgtacatcaacaaggagacgtctatgaccctggtctccagcacacctttcttggtagagttgagaattcaaccagccagttcttcctggagattctcagagccacattgagagagcagaggacttacaagtgctgccctatccatggtgactccccttggcctctaggtaagtcacacactgaagcctgcccctcccaccttccaccctggtcagctaatctaggttagtgcaggtctaacctagattacaaggcgtgctcgtgtgcataatttcatgaccaccaacaaccacatggggcaacgttatccccattttattgtccaggaaaccgaggcctggtgtggtaagtgacttgcaagtaagaggaggagtgagatgtaaacccagattcctgaatctaaattcagtggtctgtactgcagcatagctgccgcctcttgagaactagagtgggcagtgtggaagtgggaattcccaagttcccaggcctcttccagctcagtcttctatgtaaaatttttcttttccaggcttgtctgagcagaggtagagtgaccctgccgcctgttcctcaacagtctgtgcaaattcaaagaaatagagtgtgaattcaaggaactcatttgaagaacaggaaaagcaactctctccttgaggttatcggggaaatgaaggttgaaacatggatcagaagacttgctgaggtcccttccaccctcagctcttccattctgttcccaaatgaggcccaaaacacagctttctccatcactctttaatctgttggttgatttgtctggtgcacccaaccagcactgtggccctgaaaataaaatgttaattacatcaatcttacagccatccatcgctagccatctgatgctgatagaaaggcaggaagcactcgtggcagtttgcatatcagggtcagcagttcctttcttaaccctcctctgtctggcaaggctaagggagcagacgttcctgtaatgacctggcctgtctttagagctgcagccctaagagctggttttcttcctgtggctatggtcttggcactgagctccttcctgctcttcttttgctcttgtgtgtagcggaccacaacatgctttcagatcagacatcctgtgggcagaagaaattatttcacttcaataagaatttttgaagaccagtatgggttcaacgggtgcttttgggggattacaccagagataagaacagactaaatcacacgcgtgaggcagcatttacaaatcatacaacacaatatgcaatagcagcttctgagtttctgcagaggaaaggctaaggacagcaacctggttggaagatgcctcaggaacttgccttgaggctgtattttcatagcacataagattgggaaagacatcaaagaatgggaaaccttccattctggagagatggagattatgggggagaatggataaagcccccaaaaacactcttgcctctcctactaactgttcaagtctcaggtatcattatttgtatgacaaagagaaaattaacatcgttaagcaatgagccaagtgtttacaagtataatttcatttatttctcacagaaatcctatgagttatcttctcccattttacggagtataaaaaaattagttttttctagaaatcacatgaagggacagacatccccttggcaggaccaaggaagctgtggcctaattgctggccttgacacgaaggaatgactgagcacaaagaacacagcctacacagggccggaggagggttgggtctgagggcagagccctggtggatgtttctgccttccacctgggcaccctgagacaggctgtgttttttttgaagttccatcttgtcctgccacaggcccaggccaagctgactgctcctgacctggtgaagcactagccacactctgccccaagctcccgccgcatcatcacctgtcctctcctgtactgtcttctacctctggctttgatttattgttcataccagctttctctcttagtcaggcctagaggaaggttgtttttggccattaacaataaattcttaaaattccctctaaccggtggaagatataaatcacagtcataaacataatacacattcttgggacttttcaaaatgacttcctgaataatttgagatagttcaacaataattttctaagaaagacaggcttatttgagccctgctaactactcttttgatattaatacagctttaaaccctctatacttctttctgcctcaaggcttttttaatacatgtcctcatttgttacatagaatgttatttccccacccatgccccatacctgtttcaggcagggtccaagcaggagacagggcactctcggagtgattagagagagtttaatgaaagggacttttacaaagctgtggacaggtgttatggattgaaatgtgtcccccaagggacacattaactctcagtaccttagaatgtgatcttatttggaaatagggtcactgcagatgtagttaccttaaatgagttcatactggagtatggtgggcccctaatgcaatatgactggcattctatatgacagccaagtgaagacaaagacacgcagggagagaaaaccatgagacagtgcaggcggagactggagtgatacaggtgcgagccaagccaaagaccatcagagtttccagcaaaccaccaaaatctaggaagaggtgaggaaggattcccctacaggtttcagagggtgcatggccctgctgacaccttgatttcaaactttcagcttccagaactgtgaaacaatacgtttatattgttttaactacccagtttgtggtactttgttaaggcagctacaggaaattaatacagaagggttatgggaaaccaaaaagaaggtggtgaaacacccagggctggcaacaaagaaccgctgccatgccaggcctgaagcgtgtaggggaggagccttcactgaaacctgcagctgtggaagaggagttatagcttccagtgaaggaaggcactctcctccttccctccagtctcctgaaggtgtctccattggccaaaccaaatgggatggagagccggtggatgctgccaattaaggtcaggctcagagtaagaagtagagtggatgtgcagaggcaaacagactcagtctcaactgcaatgccacttcctcttcagggaagccttccctgacctcctgaccaaacctggcctctgtaacatgctcccatagtccttctgcttctgcagaatacttatagctgcaatggagggataaattatgcaaattattaagtgatgactggctctcatgctagaacataagctccatgaaagaaaacactgtgtctgccattcatcaatggcagaccctgaatcctgagggcctggcatatagtaagaatgactaggttttataggatgtgccaagaactaagcagcctgatagaaaaaggtcaagtatttaagtccaaacagattgaccttggcaattttcaaagagctatagacagcagacagcattatgttctgctgggggacagggttgctgatgatataatgtgtaacatcaaagaatgtgaccaccttgaatacttgctaatagtcctccaagagcagtaggcaggatgggcagttgtgcaaagtgaggcgaggcagaggtgggtggggagagcaactactatggggtcaagaaacttcatctgctcctatctgaatttttttcagggcagtctgttcccagtcacactggggaacttaagaaagcttagatgagtctttcctccactaacctgggaatgtaagtcctgcatccaccctccaatatggaagccacctttgctcttgcctttttgcttaccaagtgactctcttcccagcttctgctgcactctctagttctcattattaatttacctgtttgatttcaaaatttcaaagattgacctttaaactcaaaagtggaggtcccaaaaatcctaacctcccctcttttgaagtccatgtaaatttagcccgtcataagttgagatgtagtagtggtttctaagttttttacaatgtttggctttgtgtaatttaacacaggtaacctaagaacccttcagaaaagaagctagatgagctcaataaagatcaggaaactctggctcacatttggaagaccatgtttcattggattgctctttaacacatgggtaaatcacccttatccaactttgcctagagggagtttgcagtgaacacaacaatcattacaacatcttcagtctttgtgcacatgctattgatctcctcatttggtggttcttttgattacagctgtaaatgccaataattcttcttggtatgaactatgaacatcaccacatagtgtctaacatgtacatctaacctgaaactggaacaacaatatcaaatttaacgtctagggaaggaagcagaaaccctgtcaccaattaaataagctgccttaatctcctctcagttggcctaacttacctgaaccgtactattggtcttgaaggtggcactgtcatcccattagcaggcagcaggccctgcgagcctcctgtgatcagctagatttctctggggaatgaaacagctgctgatagggactgacttcctcagtcacaagtgtttcacaagtgtgttggttcagaggagggaccaggcagaaggtggttgagaggcagagctgcccctgagtgagccatgcagaggatctcctccctcatccatctctctctcttctgggcaggtaaggcagaccccagaacttgggccaagcaagactcagcagcaaagaaacatcaaggctcacaggaccttgtactcatggactgtgctccttactcaatgacctcagcccccagccctcactgagcccctctcttgtgtcttttctctcaggagtcatgtcagccattgagttggtgcctgaacaccaaacagtgcctgtgtcaataggggtccctgccaccctcaggtgctccatgaaaggagaagcgatcggtaactactatatcaactggtacaggaagacccaaggtaacacaatgactttcatataccgagaaaaggacatctatggccctggtttcaaagacaatttccaaggtgacattgatattgcaaagaacctggctgtacttaagatacttgcaccatcagagagagatgaagggtcttactactgtgcctgtgacacccaccctgctgcagctctacttctgagcagctcaaaaaccactgaccaggcgcggtggctcacacctgtaatcccagcactttgggaggccgaggtgggtggatcacgaggtcaggagatcgagaccatcctggctaatacggtgaaaccccgtccctactaaaaatacaaaaaaaaaaaattagctggtcgtggtggcgggcacctgcagtccgagctactcaggaggctgaggcaggagaatagcgtgaacctgggaggcggagcttgcagtgagccgaggtcatgccactgcactccagcctgggagacagagcaagagtccatctcaaaaaaaaaaaaaaaagaacattgccatccatgtagagcagcaattccaacaagatcgtgattttctcttgaataaataatttaggaaatagggaccagagaaagctagtgtttctacctttctttcaggctcagccactcagcttgcccgtgccctcccatggtgctcagataggcagcccccagtgggacagaagagaggagagatggagccaaaggaatgaactgtagcatctactgtgacagttttcttggaggctcataaaaggtatgaccacagagccacagtgcttagagtatagcatagattaaggaggcaccttacaatttacaactatgggtgacatccagtttttccccagccacatgcctctgaatttacatgttctagaggaaaaggactggcagtggggggaggctcctctccctccttcagatcaaatatgtacactacctgtcattttgcccaacatggaaggaaaggctacatctctagcatctctagcatgctctgttgttttgatgattactgactggatattttgttttgctttgttttgttttcttcatgagacggggtcttgctgtgtcccccaggctagagtgcagtggcgtgatcatagctcactgcagcctcacactcctgggcccaagctggatatggtgttttgctctccctttcttctctatctctttacttccacatgtgctagaaacaaaacgttgaaaaattgcttccactggcacttccttatccttctttggacagctcaatttaacactgcacttttatcttgaacaatgtgtttttccagatttagatgattgacggggctctctactccaaggctgaacctgtggcagaaatcagccttccttctgtcctcatctagaaaatctaccacttaccttgttaaataacctcataagaacttgtggtgatagacatggtcagtgacttgattgcggtgatagtttcacagatgtacaggcatatcaaactcatcagattagacactctaaatgtgtacagtttatttcacatcaagtatacctcaatacacttgtaaaaatatttgtttaaacccaaaatggattttttaggcttctttggactacttcaggcaacgtctacacaaaatgttcttcaacaaacccctctagtcaaatatcctctagtcaaatatcttccacagaagtacaaagaggctgacagggcttgccacaccttatttggtttcagtcagggcttttcactgttttgccaagtgtcttcccaatcctctctcctctcatgattctgcctgacctttcatatatataatacatgttatatatatatgttataatgtgtcgttgttccatgcattttagtcatgactgcccccatgagctcttatcatttatctccccaaatagctatattctaaaccttcagaaaatctctcttctctactcttcatcccaaactcactcactttgacctgatgcatgatcccaacataggcctggaacctgccttctacctttctgccccaccccattgggcaacttctttggttgaacggtctgcaaggccctggatactggctctgcccttggacaaaatcgggttcccaaatccccatccagatacagcactctgagctccacgatcttggaaggggtttggacccagccttccccagatgtatttaaacagagggcctgtcatgattcatcaagcccactgcctgccactcagatctaattctccttctttgaacaaatgataggcaagaaggtggagtgcatctccaacatggagaggatacaattattctcctagtttgaaatcatgatttggaaaaagaatgacatctggaaaactggttatgcagatgtcaaagttgtggagccatggttttataacgcctgcaagatggattcctagtaagaccccaagtgactccctctaacagagactgggaagagtgtctctaaggagaaggaggggaaaaaatatctggacaaatccataagactgtatgtcttccgtattaataactaatatctgttgagtgcttactatgtgccaggcagcattctaagcacttaacgtgtgttatatgattaatcttcacaacaaccttagtatttactttctattcttgtcctcattttacaaatgagaaccccaaggcacagaaaacctaaaatacttgcccaaagtagcatagctagtaagggagggtgacagatttcagactcttgatgctgcaccagaggacacagcatgtaatttggggagatgggggacccatagagaaagccaccttcaggatgtgtcagaaccaagggacaacaggggctgtgccctcaccaccaaacctgttccaattgatactcccgtgaccatctgtcaaaaaactgggacaacagaacaatggtcccaaatgacctctcaagtgttttctaactgagattttgtgatcctgacacaagcttcacactgtcttctaaaatcatctgcatctcttcatctgtgaaatggggataataagagttctaccttcactgtgttataaaatatataattatagaaagtaaataaattgcatagcttatagtagctatttaataaatgttacctattataagaaaaagcaaactgcaaggaagaataattgagaagaaagtgaactaaattactgagcaccaacgaaatgcagccactttacaggtatggactcacttatcctatgacaactcagtgaggtcattatcatcctttctgttttgcaagtgaggatactgagactcagacaggctggacagcttgcttacagaagcagagccaggatccggatctgacttgaagcctgattgtcctggctgggatactgggctgggagctgcggaatgtcctaaagaaataccttacctatagcaacatctcatgtaaaggatggctgggaacaggtatgtgaagtctggtcatctttgctcatgcaaagattgctcttgactccttggccagtttccagaagaagggatagtaggaggtcttcaactccttccccctgcctcctctcccctgctttaaaacaccaattgtaatttcagcttccaggttgttctcccgagatggctcactcccctgactgaaggaagacagctactccccagcccactgccactcacactcctgagcaccacccctaggtcagcagcttttctcccagggtacaccatgagaaacatgagagactggcccacatattccctccttctgatgcttgtcaaaggtagtctcttgttggactcccttagatcctcggggtgctcatggattcactgccttttcctctccttttcaggggcttgcctggagcgaaaaccataggggtccaaggccggcataatgagagctagaaaaattccctgggtttctgtcaggtccatagagttggtgactttaccacccacatatatctttgctgtcaagcaaagtgtgcaagtttgtctcttccgttgtcatcgacttatcacttatacagaggcagcaatggggcttgagatctgacaaccacaattctctgcattcaaaagtgagcacacgggtaccagaaaacactgcggtggatgaaggtgcaggagccaccgtgtaaagaatagaaattaatttctaactaaatgtctctgctttagttagggtcttagtccactgcagtatcttaaacaatacatattcaatgataaattttccataatgacaaggtgaacaaactcagaatcaaagctcctttcctactcttcaattcaacacattaccctaaaatattaattgaaatgataggattatacagctttttttttttgtcagagcactttattcattctttcagtaaataccatctctcatatctgcttaatttttctccacagcatttatcactatttggcatgctacatattttacttgtttatattttgttgtctggctctccactggaatacaaggtccttgatggcagagatgagtttttgtctgttttgttcactgctttaactccagcacttagaataactttggcccataacagacactcaataaatgtattaaatgaatgagggaatgaaatacatatgagtgagtgctacgtaccctgcactgagctggatgccagggacacagtggtgcacaaggctggtgcggactctgccttctgagatgttctccccaagcctcatctacccactaaaaaaatgctactgaccgtaacaagattttctgaagagttgattatagagtactctggaacaccaaataacttactcttggagagcagacatcgaggctcctaagtgcattggatgttagcaggggcaaaatgaagaaaatagtagctttctcttttctccaccttttctctcttttgagtcccaagggccccagccctgagtctgaggctgtcaaagaaaaagcgaaacacttctgttttatttcacaaaggaatttcgcaacgcttctctccaaacagactggctggggcatgctatttcacaatgaaaagccacgataacacagtttcctaaacaaaggggcgattcctaactccctctcactttatcaccactgccaccaaatgattttggtattcttcaagaatacagaatccactgggtctttttgggctttttagcaatttacacatccacaaacacataggtttatgagcggtaacagcgtacattccagtgcatgaaacactgcagggattctctgaaggcgtgccctggatgctgcaaggctccaaggcaacagtcagccagtggaacagtgtgccacccagcatgctcgacttgatagaaaaaagacccagtgacagggcaaaggaagtcaagccaacatgcaattgcttgtattaatttaaataaagccaggttctcaaactccatgtttaaataagaaatctaacagtcataagttttctttttacctgcatgcatatgggagaatagggaaagtttaaattatctttctggcttaaggacaaaattgcatgagtatttataactttcagaaaaagaaatgtcagtctaaatatattactagggcaacaaattattaagaaaaaaaacccaaagtacagtcttttggaaattaaagttgctttcatagaatatagcagcattcactcagtaacaattcattaagtacctcgtatgtgccagacgcttttctagacacaatggaagcacagctctcagaatctcaggagcttatatttcagtggaaataaacacaaaataaaataagtaaaatatatgtcagatggagataattgccatggagaggagtaaaacaggcggggagagagagagtgttgtcagcaggcttgcagaaattacaattttaaatcaggttgtcaagaagggatacaataagaaggtgacatttcagcaaaggcctgcgtgtaggcagggagcccagtatttggagtgtggatgtttgctggactccctctgttagaaataacattttcatgcacattcttaagacataatcataccagcttttctgtaggttagggagataaggagtcattttttctttcttatcttgctaagagctctttcacaagtagttcacactttcatttttcaaaatcaagcgatgaaatgccattaattagcacaaagtgtgttggggagtggacgcgagggtttggcaaggaagcagtcctgaaaagatcaaaacttacaacatgaacaggaagatgacagcactgattattgacaaacggaaaatggggcatggcattttgagccctttgccttgagtctctccctagtcacgtgaccacattctgtggactggtgagtgtttcttccccaaccacagggataagaatacaaagtgagtgatgcatttctctcactggtccccagatgactccactctagcagccccggaaaagaacctgcagcctcatctatacctgcaggttgatgtgcctcccaaaaactgtctcactcagttgtggagctgaaatcaatcatgtgttcacctcagtggggttcttggtttttcttttctggcttctccaaaaagccaatcatagagaaacctgaggactgtggagccactatggagaaggctggagtgcctttaccatccctagctcagctttagggattcaccctccaggacctctgagtgtgctgggatcacacggcctaaggtaggccctagagtcagtttctgtctttacctgccacctgacaggagtgagaagttttacttagaggcagtgagaagggaagtcagcagccccagggacagtacaaaggagacacagcctgagtgtgtgttgtcagaagctctgtcacagcgaaggcctcctcgggcataaagacctcactgtgtttgcataacacctgtgttataatcgtgagtgatcaataaaggattaactgcctcagtcatctaaggaaatgaagaagggttttatgcaccaagttcataaataaggacacagaaaaaaaccacgaaggccagtgtagctgcctctgtacgttgaaattagagaactggtacaataacaataacccacctctgtagtaagaatcaatgtaaaatctttgagttcatagctagtccatttctcagcatcaaaaccatcattttgctttctgtatggaggacgtccacccccacatatgcacactcagagtgtcagagcaatgagaaaccaattaccatcaggctccacctctttggttgaagacatagaaactgatgaatgaagaaattaagtgacttttccaacatcacacatatagtgcagacaggtaaagtgatatactgtacttctgtctctttcctccaatatcctagaagtcaagggctaagaaaagacagaaagggtaaaccatgtgatcatgccaaagtgaaagaaaaatggcagcggagtgttctccacattccagacaactacctcctgccaccttctaggtggcaatgcagtccaggtaggtaaagcgatatacaaaaataaatagccttaatcattcacaaaaatattaatgtgtgtcaaatttaaaaacaatgaattgcaaattgcccctaactttggcaagatcctttcacctaccttaaaatggacaagtttacaaatttgggctataaactgcatataagtttttgttggttttttttcttccttgagacggagtatcactcttgttgcccaggctggagtgcaatggcacaatctcagctcactgcaacctctgcctcccaggttcaagtgattctcctgcctcagcctcccgagtagctgggattacaggcaggcacaaccacgctcagctattttttgtatttttagtagagacgaggtttcaccacgttggccaggctggtctcgaactcctgacctcaggtgatccacctgccttggccttccaaagtgctacgattacagatgtgagccaccatgcccggacacatatgagtttttataagtaagttcttttagtagtgaaaaaagcataggctctggaatcagagaaaaatagaatcacaacccctcacttcatagttctgtgaccttgaaaaatgttgctttaacttttctaaccctctattccctcatccacaaaataaggataataattgcatagagttatcataatgatcaaattaaataattgcaagtaagtacctgagtgactacaaagcagaggtgctcaataatactaactccattcctttcagcacccgatggtctgcagtagagcggttcaccctctactccagacagaaggagacagaaaagacagaaaagctagaatgggagagaacatggccaatgaccaccagcatttttccaaaccaagaaatctaaagtgcctatcagcacattttttataaaaatacctcctcaggaatgttcttcccacacaacctctctaaatcctttccctgcactaatgatagtgaaggtcccaaaggcaagaccatcactgggagggtctagctccccaacaagagatgatgccctcattgcccttcatttgcagagatgaaggtgacacaggtcaatgtcagcttcaccaatagtaacagggagagtaattttttttttttgagaccgggtctcgctctattgcccaggtcggagtgcagaggcatgaccatggctcattgcagcctcaacctcccgggctgaagtgatcctctcgcctcagcctcctaagtagctgggactacaggtgtgcagcaccatgcctgggtcattttttaattttttgtagagacaaggtcttcctatattactcaggctggtcttaaattcttgagctcaagtgatgcccctgcctcggccccccagagtgccaggattacaggcatgagacctcacgccctgcatgaatgaattttttacatcaaaccttctccaacaaacttggttcagatgtctgagacaagagttgcacaaaggagtctcagtcttcagaaagttcatccttacccagctttatggatgctctaggacacatttaattcttgcatccatttaggaacagagatcttctcccatccttaaaagggaaactataatattaattactgacctgtgatgagtcagctgtccatcctcatttggcccatgctgtctacatgaagttagttttcactgtagtgcttggccaagaaaaaccaagtttttctaaatgaattccaaggataaatagcctaattcctgttctttggcttcttccactaaagaattatagggacctgatctagggaaactggggggaaaagccagggaatgagagccactgtcttgccagaaatgcatgttctgatgaggaaagatagttcaggatatctgcgccaaatcacacattggaaagaagctttctgagatctgaggaaacttccacctgctaaaaagagctagcagtctgctggaaagaaaaaaattcattcaggtgtcagaactcttactcttcactttgtgtgtgactgtagacaagtcagttaacctctttgcacctcagattctcatctgtacagtaaagagttcacattagattgtctctaagtttccttcagcactaacaagccgtgggacataggagaacaaatttgaaagattcctgagatacaggagtatggattcctgcagctgattcctttatgtgacccagtaaggataaaatcgaaaaaaggaactaaacgaaatacactcttgattaatcaaaggggattgaaagtcgtggctaacctcacacctaccttgcatcacctccagctcacctcccttgagacactcctcctcttctttaatgcctcatcatgattctcaaaaactgtgatcactcaaggttgaagcttttaatctcccatgtataaaaggatatgcaaatagagttcagtttcctgttgagtctctgccaaggtcttagcctggcagttctgggaaaagagccaaagacctcatatttcttggctgttaacattctcccatctgtgctcaagtcagcagcctaggcttcaggctgtggtttgtctttagtcttacactttcccaagttttctgaaggaaccctttagaatgttcctgcaagaaagtaagatacaagtggctcccaagaaaccagacagaggattatctggttatatttggaggcagtaagaaaaagaccaggaagtctatattcctatagtatatagccacagaatccaatcttgcaagctacttgaaatgctgatattaattaagtcttaggcagggctttcaataagtcatctgtgtctccaatatgggatgtcccacatcatgcatatgcacagtgaaaaaaagcgaggtccttgggtacagtacagcattcaaaaattaaagatctgaaaaacacaagacatctcagtgtgcttccgggctggaggctctgctaaacaacagaagcagagaccggactaattgtcccccatgtctctttgactgaactcacacaaaatagaatctaccatttttactcagtgcggggtacccagactcaagtttactgcaatgttgttaccaatattctaatggaaaattatatattcagagctatgttaaatttgaccatttattaaacatgaaatttctactttttctgtaagtgccttgtcttacttgtatttcccggtatttcccttctaaagctaactccccaaagggctttcctgtatgttctcacttccattacaaagtcaatgtacaagttaatttttttaatttctttagaaacctttataaagagatttcctccttcatttctctgttatcccaggcagctgtcaggagcaaagagctcaagcctgcactgccttggaacaggacatcagcaaaagacactctcaatctactcagaaggctgaggtgggaggattgcttgagccaggggttcaagaccagcctggacaactaagtgaggctcagtctcaaaaaaaaaaaaaaaagatctcaatattattgttccatacccagtcattcacttggtgttttctgcagcatttatttataaatatctcagtctgttcttaatccttgagcctatattttttaaaatcatactttgatatctactcagagtattgattctcttcaaatttcccacctcttagttctcctcccactctctcccaccctgagccttacacctccaacaatgatcattctaagaccatttatatctcaataggaaagtgatgtaaaacgggtctccttactctgttttggagggtttttttgttgttgctgttgcttgcttctctgtcccaccccaaactcatgtgtgtctgaaatttagcaccaccttgcgacgtttgtgagcatttttctcagagcagcattttgagactgagcctgaactccactgatgttatgacccttaaaagtgtctggctccaaaagactaaggagttcctgcgtaaatccaggtccagctacttcatcactgtgacttgttattggaaaaggttgagctatcaacatattgctcctgtaaaggctcagaactgaatcttagattcttcaggatatttgagtcctctgaggctcctgggtaaagactccaatgtagcagttctgtggactataaatgggagatatccagatcatacaccttcaatggaagaaaaagcactgtcaccttagacgactccaactctgtagtctacttttgtcttcctaatatcatacctcattctccagtgggtttatggcaagcctcatctactcagaagtaaccaagtacaagccaacacactcttgtgttagtgtggaggcccaaagtggcataagtgaatgtgactccagatgaaaaccttcccctctccaacacaaagatgccaaagactatgtataaagcaagtcttaaatcactctatatttccatttgaatatatttccccagttcctgtgcattgcttctgcatacacagaattcaatgataaaaattgagactgtctcctagatacagtaattaactcagctatcaatgccaattgactgtgtagaggggagacaattttgtaccaagatttactaacctctattttaatggaaaaacaatggaaaagctttcttcctactatgactctctctggataaattgcttgccaggaagcgttaggataattctgccatgactctttgtcttccacacccaaagacatttggtctccatcacatatggaggaaggatctccttgttcagcagtatttacaccatcaccctgacacccgcagtcagatctaactatacagcttggctaataaacctggagaagctcatattctaagaaaaaagtggagagtggtgggacagatggggcctgagtgctgggaaactgcccgtgcccactgctgacttggtcttctcaccagctgcttgatctaacagatgcatcttccttatgaggcaccagagaaccagaatgtccacatcctgtggtcccctgtacccttaacaccccacatttgagttcctttccaattcagaaaacaaaacctgcaggctttgagccaatttacaacagatgtgggtcacaacaaccaactacccaggaagcctccaccagaacgcagcgtgagaatcagcttcttagatattcccatacgtgtgatcccatcaatcatttaacaactgtcaaagagaaagactaggagactttctcccgagcatctccagggatttaattcactatgttggaaattaagagattactactaagccataagaaggctaagacagagttaaaagaattattggaaggttggcattacaactttacgtgtacactaggaaaatctgcagctctacctgtagctttgacataatgccttcctataccctgtccttgcccaactgtgactcccacatcatggtcataccctggataggcccctctctgcatgtagagcaatgtgaatggggattctgcttatcaggatatcatcactagtctgtgccaggccttgcaagaatgtccttgtactgcaactatttgtaccagatggtaccctggccacccctaagtgtgcagactttttaactttttcccccaagaaagtggtccctgatgtgcactgcctactgagtaaggctaagaaagataggaaggaagaggacaaagtgcaaggagagaaacatttttgcaaggagaaaaataatgatgtggatgcagaatatttatcatgtgaattcatattaacctgacttcctcagaaaatgtcaccgttagtattagaatgtgtatttccttcggagctctgaaagaaaatatgagaattcaaggggtgctagtgcagaatacacacacacacacacacacacacacacacacacacactgtgcttcactgtggctggaatgatgcagagtcttggcaatagttcgggaagctgctagctgtccgcccattgtaaacagtgaagtaggtcatctgtggctccccatcctcatctgtctgggccattttcttgggccctcctccacatcccattcctcatatgttctcattctatttccatcaaacctcaatctcaagaaatgacctgaaatcaattcgtactaatgtttgagtcatgaaaacagaggaaggctttagcttctctgagattggcagggagggtcgctagtgagcattgtattttcataaagataatagccataagctaaacactgcagcaaccacagcagaattttccaagcctgaggaacactgcccaaaatgaaagacagaggtttgttctctctttgtttggaggttcagtgtggatcatacacagagagtctggagcctcccacagtggacacttcttttcctctgtccagggagaagtccagctggagcagacaaccagagagaacattagcctgaccatggggaaaggcattgcagcagaattaggcccaatagaggaaaaaagatgcctggaaagaaatttcatttcaatagcaggaatagctttgtaagagctgatagccattcaacagtgaaacaagcatccttgtcagtggatgagttcggtggatgactacactgggaaggttgtctacattggttgggagctaaactcagtgagctctttccctcctagaattcattatatactgtatgtatatgattatatatactctgtgtatgtaatcgtgtattacatatactccatatatgtatattacatatacatatattacatatactctgtatatgtaatcatactccatatacacatttgtatccattacatattcaattttccatgctattggatatttttcctattcaataattttaataagctatgttaatattgtatctagagctacattatagtttactcaatcagttctcttcatggttgagcatttaggcaacttctaaatttttcctactatgaaaattattatgatgaacacacctgtacttacaactttttcattatttaaagtcatcatatatgtatatgatgatttggatccacttccacatcccattccttatatgccctcattctatttccatcacaactcaatctcaagaatatttcagtatgtgacctgaaatcaatgcattctaaagtttaagtaatgaaaacggaggaagactttagcttttctgaggttggcagggagggtcacaggtgagcattgtattttaatagcaataatagccataagctaaacactgcagcaaccacagcagatatacaaatggtatatatacaaatatacaattatatttgtataaatatatataaacatataataaagtaagctcctattttcttaattagaagattcaaagttaagaattttgtccaacttgaatatatgaaactttagggttatagagaaattagccaattctactttagatgttttaatgtattaatacagttaaacacacatattttaaaattacatattatataaaataatatatcaattttgaatactgctatttccttttaataattcataaaataactttaaattcttcacaggcatttcaaatcaatgtatttgttgccactagagccacttttttatcctcaaatatttttccagagtatatgaaactcactttgctaaattgaaaattaagaggcacattagatttagaaacataattttaaattgtttcaatgatggcacattattaatacctactttgagacacaatacatactcacataatattagaatcattgttttgccatttatcctgtaagtgaatattcatgatctccacaacaaaacatttactttgatagatttgtttaaacaatatcaaacacttgcagtcttgaaggcactggaagacccaaaaaatagttactacgtttctgttaaactacttagtcatctttttaactaattctatcagctgactgccataagcatccatgagctagcattgattgagatcattccaatgtgtcctcactaaactgtacttaactgttcaaagccaaataattaagtgaaagtatggtaatactgtttttcataattattgtaaggaatcaaatataagggatttcttcttctctgaggatcatgaaccttactccatgttcaaatagatatagtattttttcacagtaaattccccaaagtggaaatagtcactcaaacgaatacttttactcttttgacattaaccaaatggcttccaataaaaatcaaacaatttatatttttaccaacatcttgcccacattgggagtgtcaacattttgagcaaaagctttaattaaatatccatccaaaaaatggtttgttaatactttacagttttattactagagggttaaaatcctttttcaagtctgataatcaatgattaactttcttcatttgtccttcacccatttgttttttaggttgatggtgttttacttattgatttgtgtaattataataattttgtgtctgagttttacagcatttaaccacaaaaacagcattggtgaaaggagtttcaggggtattgtggatggcagcgggtggtgatggcaaagtgccaaggaaagggaaaaaggaagaagagggtttttatactgatgtgtttcattgtgccttcctaccacacaggttggagtgcattaagcctttgtccaaaaacacccagccgtgacccgctatgtatgtctcagcattgggaagagtcctctgagtgtcatgggaaaataatatatgagttttattgcccctgtgtcccaattattttctgtttactccatgttggtctacagcaatagcttcagaacataaacaaatatcaccaaaaacatcagtgatgaacaattccaaccacacatttcaatgtttactaaatatacccgtggcactgtaaaaaagaatataatggaagagtaaaggaattgggactgatcgtgactgagaacctgtatagtaggctacacactagctatatgatgaaccaagaagttgaacccaaatctaactaacttacataatcccttcctttaaagaacttaatgtccagtgcaaagcaagtgttcaaaaaagtgtttgttgtgaattgaattcatttcattggaatacagcatgcttgcaaagtcccaactttttaaaataatgtgtttctaaagaccactggtctttagaaagaccaatgaccaaagaccttagaccattggtctaaggaccatctggaagcagatccccaaggtgaaattctgacgttgaattcccaaatctaacaggtcatgtgccttgttctgatgagaaaactgtcgaataagggagtagcagtggcatgaaggttgttagtaggtagcataggccaaatggcccagtgatgtgatgaaaagtgcactcctccaaataagaccctagttactagaaagtcacaagtaggtaaacagatgccgggagggacagtttttgttggataaagtcagcagagaaaggcttttggaggagatgaatcctgagctggtgtctacagatagtgacagacttagtgcgactaggaatattatggagaataaaagaatctccctctctaactaatgccaccaagcagtcccttcaccccagagcaaaggcataacctatcttcacccaagtgaactatgtattcttgaaatatatctccttggaactaaaccatttttctgttcacttcaaatcaaccagtgttaatatcatagatctgacagcttagaaggcctgtgttctccttcactcttctcttgaccctatgtgagtttgattcaagagcatggggattagtcccttctcttgaattacaatcaccaatcagcacaccacatccagttgctctttttaagtctaggagagcaaaaacaatgcacaggtgaaggaaactatgcctaggcctcatccctaggttgtacaaagtaactgaatttatggcttcaaggacagaataaatcaaataaaatcaaagaagcccattttcagggaatagaaacaattcacagaaataacaccttgaatgaaattctcatttttagtgcagaaatggaacataacattcttagattacttgctttctaaaagtgaatattctttaggtattactttttcaacattgatgagtttacaacatttctttttgcatagcagacaaaactgtgtaggcattcacagttacagaaagaaaaaatatgactagcttcctgcttcacacaaagaaatcatgcaaaaaaaaaatttcaagccaaaagaaaaaaaaagttttaaaacattttaaagtctcatattacttgctggctgtaatgggaatgtgtaactttgtgaagatgtctgtagccatcttattctaatgatcacttatctttatcaagccattatgtccatcttgacatgatgcaatacacagggcataacattacctacacagtatttctgacataaataaataaactaaaactaatcaaacttttagttctaacaggagacaggaagctagaaaagcaaattaaaggattctacaaagaaacatctagacaaatccagcaggtgagacattccactggacaacaggttcagtcccaccaataatcaatgtcatgaaaaggcaggaaaaaagtgcagtagaggggaagcagtggaaggagaactattaaagattaaagagattttaaagatttaacaacaatgaaatgcacagtctttgaatggatccttgttttaaaaaaaaaaaaaatctgtaacagaggccaggcatggtggctcactcctgtaatcccagcactttgggaggcagagactggaggaccacttgagcccaggagtttaagaccctgtgtctgaaaaaaaaaaaaaaagaaagaaagaaagaaaaaggaaaaaataatctataaaagacatttggagcatttggaggaaaactaggaaaacttgactatgggttggctattaagttattttcgggaatttctgttaactttgttaggtggaaaatggtattgtggttgagtagaaaaatatccttttttgtaatatatactgaagtgaattgtcattttatctgtattttttttaaatactcgagcaaaacaaatagaaaatgtgacaaatgttaacaactgttaaatctaagtgatcattctatagatacttattttattaatctcttctttttggattgtttcaaaaattttataataaaatccttttttaaagtcttcattttgtgggtgggcatggtggttcactcctgtaatcccagcactttggggagccagggcaggtgattgcttgagcccaagagttctaaaccagcctgggcaacatagcaaaactctgtctctacaaaagaatacgaaaatgtcaccaggcgaagtggtgcatgcctgcagtcccagctactagagaggctgaggtgggaggatcacttgaacctgggagatcaaggctcccagtgagccatgagcatgcctctgcactccagcctggataatggagtgagaacctgtctcaaaaaaataaataataaagttttcatttttaaatggccaacaagtctacagcaaatttaaacaatgaaaatatgagatacaatatcttccttaaaaattagcatattttcttaaggaatactgctctgctcgaagaattccctagttctgtaagcgttcgaacaaattaaaatcttgtgtttatataacatatttctaagacaacaatgaattctgtcactaactatatgagtaaaatgaacaagaaaaccactaataatgatggtgcacattttagattccttttattctttttcaagacacagacataactgagatatcttaaaatcactgactttcaagatttgagataatgataataactcaagatcaagtcttccccttgtgttagaagtgggggtgggacagttccagacttccacagttgtaccaatgaaccccaatcagatgattttcaagttacttctccttcaggtgggtgggcatcagagagaagctaagagaaggttttgacaaaatccaaagtgtgtccagacccctcaaataaggtaacctgaccaagtttaatacattcttagggcctaatatggatctcagttaaaaatcctggtctcttttaattcttgtccagttgctaagtgtattatttgacccattaactctgcaagtcatgttggtccattcttcttctttacggttttgcaaaatacatcaggttacagtttcaagtatctgtcacttaaacaagtaagcatttattatttttaatgggagggctaacatattgccacagaaatatagtatgggtactgaagaaaatatacacagactctcaggtcatcactgagccttcccaccatcatcatagatccagcatctgacttccagagtaccaccaagaagaaatcagaggcagatgacatacatatccatggtccttgactctagagagtccagccaaaatgtgtgggtccatttaatcatttctacagaaatgggaggctattgctccaaatgacttctaaccactcactcatccatcactcaaagcatatgatacaattgatttaccagtcattagtaggcaggtagagagtggtgaagcagtggagagagcttggtatttacagctgctattgcaactttggtagcacaaacaacatggaattaggacagggattttcaaagtattgcccacggacttctgagcacctcaagatcttttcagggagtccatgaggtcagaatttttttcataataacagcaaaacattacttgcctttttcgttgtgttgatatttacactgatggtggaaaaacaatgatggataaaactgctggtgccttagcatgaatcaaggcgggggcatcaaatctgtattaataatcatgatattcttcactgccacatattttcaggggaaaaaagttagtttcacttaaaaatgatactgactgtattaccttgctagggctgccataacaaaataccacagactaggcaacttaaacaacagaaatttattttctcatagttctacaggatagaagtccaagatcaaagggctggcagagttggtttcttctaaggacccctcctccatctccaggcagacagcaggcttgccgctgtgccctccagaaaggatggtctttcctctttgtgtggggaacactggtgtctcttctcacagtgtgtccaaatttcctcctcttataaggacatcagtcagattgaattagggccaactttaatgacctcattttaacttaataacttctcaaaaggccctttctgcaaatatagtcacattctgaggttatgggatttagggtttcaacatgaatttggtggaaaacaattcaacccataatactgacaaagcaataacaattattaattttattaaatctcaactttcgagtacatgtctttttagtattctatgtgacaaaatgataagtacacataaagcacttctgttacattccaaattatgattgttatctaagaggaaacacttgtgtggttgtttgagttgcaagctgaactagctactttttccatgaaacacacatttttgcttgaaagaacaattgacaggcaactatggttattcagacttgtagatttgccaggcattttcttaaaaacaaatgaacagagcctgtcatattaaaataaacaacttatagttgttgctaattataaaatcttttttttttttttgacagagtctcactctgtcacccaggggggagtgcagtggtgcaatctcagatcactgcaacctccacctcccgggttcaagtgattctactgcttcagcctctcaagtagctgggattacaggtgctcgccaccacgcccagctaatttttgtacttttagtagagacagggtttcaccatgttggtcaggctggtctcgaactcctgaccttgtgatctgcccaccttggcctcccaaagtactgagattacaggcatgaggcactgcgcctggcctccaccagtactctttagcctctgtcctttgagatgaaaggcgtatatccagggagtcattgccacttcaccctgacctctagaatgaagacacataaaacagacctaaatccaactcacatcttgaagccaagtccaggtggcctgcagaccagtgagcaaaagtgatacatgtttgttgctgtaagcaattgaaattttggggttgttatagatcacaattacaacaaaaatagctgattaatacagatggtgggtcttgagaggattctaccttcatatgcttttaactctatgtctctagcaattatgaaatggcatacctaaaatttttggtggtttcctattatcctcaggacaaaacagtatagcttacttgctcccttaaatgcagttgcattgaactacttacttcctgaatgctctgtgttctttcatatttctttgcttgagatgccctttccttcttctatcccccaattggtccgtagtccctctgtattttcagggtcttagctcagttgtttgcttccctgcgaattcctaaatgactaccccagtgatctgggttaagtgctcacccttttcggaattttcatagcatccagtacttatctctattttcgcactcaaaaccctttttctttcttcttcattaggttgagacccttgagagaagtgatctgtcttgttcatccctgtataccatgtaccagcacagagcctaacccagtgagtgctcagaaagtgccttctgaacccattttaaggatgaggtatctcaggttcagggaagataagctagtaagtgacagagccatggccagatcttcccaactcccaggttctggctcagtgcctggtactaggctgccttatggaatactgccttaacatttgtttagtggtattaaaacacattggtttttaatattagcctgagttaaacatggttggtaagtttaatttgttgtgatttactccataccatatactatattctaaagctgtatagaaatgagtttcacattgtctacatatttggagtattcaagtcatgttctcttccactaagatcaattgcatctctggagaggaatcctcgaatgccacagctgggagatgtttcaaagatcatgtattcactctcctaggttttcagatgagagagtctagaaagatccagagaggtttcacaacttggccaagtcacccaatttcaaaagaacttacaagaaattgggtatctctatcccagtgcagtgatctttttggtacactaggcgaatgtcttctttggtctttcattctggcatttatggtttgagactgtttcagcctgtcagtggatacccttccctggagtggccctaggatagtctgggcaacctggtcctttctttctctgtgtagattttaatcgttatgtgagatgctcttctgcaggaatggggaagagcaggcacaaggtggatgaatcctgaagttcaactattcctggaaggagactgtgtcatgttcttttttccaggcaaactcattttcagaggaaagggacagtgttggaggctgagttgactgtggtacagttcagtcctggctgggttgaggtctcatgcttgggagcaaatatatgggatattaagccaagaaatgaaacagggattaaacaggggcatcctccaggcttagaatatttgggattgtgaactttgagctagtgttatttatctctaccccctgcttctggtattaacacacacggtttgagagttgtagacagactacggcgtgttttaaaaaggataccaggttgtttaacagacttcaaaccatgtcctgggaggaatagctaaaacatatgggagactgtagaccaaaggaagggaggtatcatagtgatcacagtcttcagatatctgtcagagaagagctggcatatcagaagacagttggattctcatgtctgcttatgcactctacctattgcagtatgttggtttggttgaaatatatgaggaaaatctggcctcacatagatatgtagtatgaaaacaaaggagtattttaatagcttgttcaaaatattgtggacatgatattctttatattgcaccataattatttgacaagaggtagtttctttgaaggttagttgcaatgtgaaatctgataccatcttagtgaacttatcatattctgttacattaaaacattggtttatcctgaaatttggatagaacgttcacccatgcatgcttcttaacccatccattagtcacttgagaaaattggttcgctgttaagcagcttccacctgttagcacacattttattattcaataccaaaatattacagtagctaacatcatcactggtctctttaagtcaggaaaaatttttaaatattggtgagctatctacttcacagtgacaaacataaatttcctaaaactctaatttttcctggaagcttagattttctaattagcaggctgggcacggtggcacatacctgtaatcccagcactttgggaggccaaggtgggcagatcacttgaggtcgggcgttcgagaccagcctgaccaacatggtgaaaccccgtctctactaaaaatacaaaaattatctgggtgtggtgggagtggctataatcccagctacttgtgaggctgaagcagtagaatcacttgaacccaggaggtagaggtcgcagtgatctgagatcgcaccactgcactccagtctgagcgacagagtgagactctgtcaaaaaaaaaaaaaaaagattttataattagcaacaacttagcttaggaggctgaggcaggagaatcatttgaacctgggagacaaaggttgcagtgagatgagatcgcaccactgcattccagcctgggcaacagggaaagactccgtctcaaaaaaaaaaaaaaaaaaaaaagagagagtgctggtggaaacccattatgtgacgtgtcttgaagcctcagcttagaactggcacaccgtcacttccactcatattctatgaatcaaaacataatgaagccccaatgtcaatagagcctgtagtaggaagccctgcaaagtcccatggcaaagaacctggaggtacacttctattacagggaggaagtgaagagttgggaagctgcattctcatcaggattcccaacttctgtttcctctaactaatcctattcacaccagtttctgatggctgcttcttgggaaagtcaccagcactagaaggagctcaatgagtctcatatgggtgagtcagaagcttatttcatcaatcagctacctcttgccatttcaaagactagtacctaaggccagctacactcaagagtccaagtgacagttctttattctcacctggttctccccatgaggccttttgctgtatgccatcccattacatcgtctgttattgaagccataacatttcttatttttctcttttcctatttgcttttttttaatcagcaaaagaatgttagactttatatagagagataacgttccttggagtttatggggcaggcatgcagctgtatgtagggtggaaagtcattacaaaggtcataggtaaaatagtcataattaaatcaaaccatggatttggataagactccagggaaagtgtgaagagtaacctttttaaattcctgctccctgttgataaatagcaacaacaacaaaattcctactcttctttcatggttaaagtttaataaggtcactttcgatgagcctatcacctatcatattgctttgttttgacagcactagaacagagatcaaaggcaaacaagaccagtgtcttgtgagccctgaggagaggttttgagaaggcaatgactgggtcaaaactctgaggtcaaacaagattaaaactgaaaatcatccgttgaatttggccagagctgctgcctctgattgctcaggttgtgccttcacaagggcatctggcagagaggagaagtggggctaaaattcaatgcgtgctctgccgccagccaaggccctgatgtggcgttgcatcttccggaaagggaaggccttttataaaccacacaaaagtgcaatctgttcgccaagcttgaacccaaggggctatctctacattcacccagcagggctgccttttctaaatcgcacaaagcaccatatgggctactggcctgaatttagcaactgggaggaggtcaatggaggggacacaattttaaatttacatgaaaaccctttgtaaactgtataacactattcaagtgtaaagcaggaagaggtgattcagaagcttagcaggtgacaggagaaattacactgaccacaagccttttctgcctaacccacagcatgtagaatctccatgagacgtttaagtacccgacaaactcctcagtgggaaaccatttgagggcagactggccagaaagcacagatgggaatggatgtgattatttctaaaagtccattctagtcacaaaccccaaggcagatctagccagtggggcagaagagccccagacagaagcacctgagccagcttggcctgacctaactgtcaggaccctttgatcttgctggagcttgacttggagaaaacatctggttctggggattctcaggggccatatagtgtgaaaccgaggggaagtttttgtaaagctctgtagcactgtgactgggggatacgcacagtgctacaaaacctacagagacctgtacaaaaactgcaggggcaaaagtgccatttccctgggatatcctcaccctgggtcccatgcctcaggagacaaacacagcaagcagcttccctccctgctttggggcctggaagggatagcaggaagttgactggaccagggagatgaccacagctgctgacctctcactcactgctgttcttccttgggtgaaactggcatttctacattttcttacagcacatttggggaatacaaaaaggcctttcttaaaaactattcttgtcttgttttcatgttgattctattgcaaaagagagttatatgagccacctcatacggaatttctaaattcaaacctctagagagatttacccaagtgctttgctttgcagtttgggaggatggatttgaagagagattgatttttttgtaggcaatcaccggccacagttgctcattctaaagctgactgctctgtaaatcacccagtgcttcatgccaccctttctcctcttgctgtgccacacgttatctgcctttaaagcagcagcactggtgtctgtaaaggccttaaccctggagtagtcatggagccaagacccacccctttgacagtgccagctttccaacacagagagctgagtatgggtctaggaagtgagagcaatgtaaaacaatagaaagcaacagttcagagcactgcatcaagtgtactgtgctggaaaggtccgccataggaaatatggtcctccatactcctcagacaacagccttccgaaagcaaacctgtccctacctgcagatgattaaccatctatgaaccggctgggtaagcaacaagtgccatctttcatggagctgagccttaaagatcctccagtcctaaagctgacgggaagaaggtaggtgggagcagcgctgaggtttttggaacgtcctcaagtgctgtgacaccgataaactcatctttggaaaaggaacccgtgtgactgtggaaccaagtaagtaactcatttatttatctgaagtttaaggttaaggcatcctccatctaaggaggcagaaataatcctgaaatgggaaatgggtgaaatagctagcatttaggaggactcctgggaagaggtgaaatatggttaatcctttccataggagaggagcagaaggtgtctgtaaaaaaagagtttggggcatatgaagggacccttctggctcagaggaaacagagaactctgcccagtccatcgaatttgggtcaggctgtagaaaccacagagtcattggcccaactccctgagcagagtcagaatggacacagaatgaagctgacttgagtccaggtggttttaccaacgtgattccaaacgttctgacctcccttatgccaaacacatcctcctggaagagctcagaactgaatccgtctcctgggcatggagggtggggcgagcgcaagtagtccctggtgttgcgatatttctctttagaagaaaataacctgtttcagacatttgtttctaattgtttgagctgcaaatgaaaactaggttactagtgagaaatatgggacattctggttcccactgagaccagattccaagcaggacaaagtgaatgtgtagtgcttccaactaagaaatgctttgaagtctccaggacacagccaggagagttccctaccactcaccagtgttcatcgtttttgcaaagagtatatggtgccagtcacttattaacagttatgcaagaatcaatgctaaggttgttgaaggattgtgctcaacacagaaggcatctttggtgtcctttcaatgacatttgaattcgaccgtgtcttgctaaaaaataaaataaaataagacagtggtctccacctggcagcagattccagttagatagtacatattaatcttaagtaagaaaatgtaataaaccaatacaaaaacccatttcgaaggtcctagggaagtctagcaataggggtcagtggtcccaaatctgcccaaccagctgttggaaaagaaacagcatgccctgccctggctgggactttggcactcagctcaggtttttcaaggtaaaagaaggctctagagagatagggtggtgatggtgggctcttctcagagaccaaatggggacaaagcagttccaggcatatgcaggcaaggaggctgaggaaggggaaggacaggcatgagcaacccaagacctcacacactgcagggagaaaagggcaggggccctgccgtcagggagaaagacacccaaagttgtgctagtggagtcagtgcagagatgttcagacttttttaaaaaatcaacatcttagtaagattttgaaattttaactaatttgggcctttgcctttagaccttattatccttaaaattttcactaaaataagtttatccacaattccaacaaagctaaagactgattatcctaatttccctttgtttgccaagtaagggatgaattaagttcctctgtttacccatttacttggtccatatttccctaactgcggagtgcacagcacatattttcagatggagagacgttctttttatttgcatggatctatcttttaatggctatcagaatagtacaactaggctatcaaacccatgtgatttcaagtttccttttaattatattttaagttaaaaagtgaataaatttttttaaattattaagcaaattatgacagatgactatgaccaaaaaagcgggggagatgtgcttaattgaagtttgggaagtgctgaacttcatattggtgcatttcatcagcctttgaagtgaaaaagtaaggggtatccagagggggcacaacctagaatatctttgaatggcagcttctatttttaagctaccaacattggattaaagagactgcactgcaaacccagggcctttatcttctcagaagccttttgatgctttttttttccttgggagcttctttcaagttcttacttacggagctcctgggtagcacaaaactaacagaacaggtctatacaaacccacagctgtagatcccacactttagtcctctggatacagtaaacctggagagaccacttagcttcgtaaaacagaacagagaaacaggacaaaacagcatggaataaagtaatggaaacgtgtacttctatggtaacaacagcggcagtggggaaaagaggcatggtcgttgggaacatctgcgtggaagtgggccatgtgatggactttgaatgcaatctattattgtatgtcacaattatgtaactaccactttttgagtgcctaccatttattaggccactgggctaagtcctttaatgattatcacttcactcagtcctcactacgatcatgtggaattgaggtaccatgacttgcgttttatggatcaggaaactgaatcttaaaggggttcctcaagatcacacagcttagtaaagtcatcatttgaatcacctgcttgatgccagcatctgtgctcttaagaagtctgctcttccatcagggctgcagctagactagggcatgtgtggaggtttttcctgcctggcccagcctctgcctcaggtctctaatgagctccttttcaagctgaatcagaaacaacagttatgccacttcccttccagtgccatccccatcacttctctcaccaaggaagaacttctgaacccccgccaaaaccagttacccaaagcagcattccccttccccaggaggagccaggtgaggcccatctctcacattacacccctggagacccagggtccctaaatacagaaaggtccagacgatgatcagagcatcactctttccctcaagaaaaggagtccacataattctggcctcatcaaaatgtttctcagattccaaaagatgaccttcccattcctccaggcccactagcccttggcctggcatctggcactccctctcactcccagtcagcatctcccagaacagagcctttgcacctgcaagtccttccacctggagccattttctcccagggactcacacagttttctccctcccctcctccaggtctccactcaaatgtcatttccagtgaatcctttccctaccacctcatgtcactctgaagacccctttccctgctttatttatagccctcatgtctacttgaatctttatatgctcgtttactgtctgtttcccttgctctgtgagagaaaggactttgagttgtttcttactgcacctataagtacactgaaagcactaaacaaacatttgttgaatgagtgaatgaataaataaaggaatgaatgaatcagagaaaaagtcagctatggtataaagcaaaagaaaagaaaaatgaagggaagctggtaacctacagagccgagcctgagtcctggctctgcaacccatcacaggtctctgccacgaagtgccaggcactgttctgggtgccagggaatcgacatgaacaaagcaggcatgaacttctgccatattggagcttattttctaatggcaaaagacagatggtaaactaaataaataaataaaaaatatatacagtgcgttagggtggtaataagccctgagaagaaaaataaagccgggaaggagaataaagaggactagtgggagggaccagcatgcagttttaaacagaagagtcacagaaggtctcactggaaaggtgacagtggagcagagacccgaggaggtggtaaagtgaggcatgcagacctctggagagagagcacttccaggcagaggggacacagggctgcctggggtgtgtggctggaggaggggagggagtgatggggagagaatgtgaaaatgaggtcagattggtgatgggttggggagagggtggcttgtaggccactgtaaggactactgcttttggattcgaaagggaagattggggagtagaatggaagtcacacgtaacctagagaaaagatctagagagacagaaacctgaataccagtcctaacccacggccctaagaagtgggcaccctcttcatatcacataacaccaaaaaatagcttctgttctttttcagcaacctgtcccaacaatccttcctgcttgggagctctgttcttagtgcaattacattccccacgcttctagtaaaatgtatcttctctgagtttagccctaataaacattctaataattacatcgagtctctctagttcacagatgctgtatctaatcttataacctataatacggaagatgttatcctcacttcgtagagaaaccagataaagctcagtgagtttaaggaacttggccaagattacacacttggaaagggacagagtcaaaactaggttttggatcttctgacatccttctactttacaacgactaggaaccacccttcatgttagtgattctccaactatcatctacagtcttttaaggattgtaaactgatccgaaaaatccatattccctccttggtttttatgagtgacatacaggcaatctcatagattctgatgttcacgtataacagaaattaatttaactgtcacttctaagtgtgagagtgtcattgaagctt

SEQ ID NO: 22667 - DNA, 7323 bp, Homo Sapiens
gccagaggcgctcttaacggcgtttatgtcctttgctgtctgaggggcctcagctctgaccaatctggtcttcgtgtggtcattagcatgggcttcgtgagacagatacagcttttgctctggaagaactggaccctgcggaaaaggcaaaagattcgctttgtggtggaactcgtgtggcctttatctttatttctggtcttgatctggttaaggaatgccaacccgctctacagccatcatgaatgccatttccccaacaaggcgatgccctcagcaggaatgctgccgtggctccaggggatcttctgcaatgtgaacaatccctgttttcaaagccccaccccaggagaatctcctggaattgtgtcaaactataacaactccatcttggcaagggtatatcgagattttcaagaactcctcatgaatgcaccagagagccagcaccttggccgtatttggacagagctacacatcttgtcccaattcatggacaccctccggactcacccggagagaattgcaggaagaggaatacgaataagggatatcttgaaagatgaagaaacactgacactatttctcattaaaaacatcggcctgtctgactcagtggtctaccttctgatcaactctcaagtccgtccagagcagttcgctcatggagtcccggacctggcgctgaaggacatcgcctgcagcgaggccctcctggagcgcttcatcatcttcagccagagacgcggggcaaagacggtgcgctatgccctgtgctccctctcccagggcaccctacagtggatagaagacactctgtatgccaacgtggacttcttcaagctcttccgtgtgcttcccacactcctagacagccgttctcaaggtatcaatctgagatcttggggaggaatattatctgatatgtcaccaagaattcaagagtttatccatcggccgagtatgcaggacttgctgtgggtgaccaggcccctcatgcagaatggtggtccagagacctttacaaagctgatgggcatcctgtctgacctcctgtgtggctaccccgagggaggtggctctcgggtgctctccttcaactggtatgaagacaataactataaggcctttctggggattgactccacaaggaaggatcctatctattcttatgacagaagaacaacatccttttgtaatgcattgatccagagcctggagtcaaatcctttaaccaaaatcgcttggagggcggcaaagcctttgctgatgggaaaaatcctgtacactcctgattcacctgcagcacgaaggatactgaagaatgccaactcaacttttgaagaactggaacacgttaggaagttggtcaaagcctgggaagaagtagggccccagatctggtacttctttgacaacagcacacagatgaacatgatcagagataccctggggaacccaacagtaaaagactttttgaataggcagcttggtgaagaaggtattactgctgaagccatcctaaacttcctctacaagggccctcgggaaagccaggctgacgacatggccaacttcgactggagggacatatttaacatcactgatcgcaccctccgcctggtcaatcaatacctggagtgcttggtcctggataagtttgaaagctacaatgatgaaactcagctcacccaacgtgccctctctctactggaggaaaacatgttctgggccggagtggtattccctgacatgtatccctggaccagctctctaccaccccacgtgaagtataagatccgaatggacatagacgtggtggagaaaaccaataagattaaagacaggtattgggattctggtcccagagctgatcccgtggaagatttccggtacatctggggcgggtttgcctatctgcaggacatggttgaacaggggatcacaaggagccaggtgcaggcggaggctccagttggaatctacctccagcagatgccctacccctgcttcgtggacgattctttcatgatcatcctgaaccgctgtttccctatcttcatggtgctggcatggatctactctgtctccatgactgtgaagagcatcgtcttggagaaggagttgcgactgaaggagaccttgaaaaatcagggtgtctccaatgcagtgatttggtgtacctggttcctggacagcttctccatcatgtcgatgagcatcttcctcctgacgatattcatcatgcatgtaagaatcctacattacagcgacccattcatcctcttcctgttcttgttggctttctccactgccaccatcatgctgtgctttctgctcagcaccttcttctccaaggccagtctggcagcagcctgtagtggtgtcatctatttcaccctctacctgccacacatcctgtgcttcgcctggcaggaccgcatgaccgctgagctgaagaaggctgtgagcttactgtctccggtggcatttggatttggcactgagtacctggttcgctttgaagagcaaggcctggggctgcagtggagcaacatcgggaacagtcccacggaaggggacgaattcagcttcctgctgtccatgcagatgatgctccttgatgctgctgtctatggcttactcgcttggtaccttgatcaggtgtttccaggagactatggaaccccacttccttggtactttcttctacaagagtcgtattggcttggcggtgaagggtgttcaaccagagaagaaagagccctggaaaagaccgagcccctaacagaggaaacggaggatccagagcacccagaaggaatacacgactccttctttgaacgtgagcatccagggtgggttcctggggtatgcgtgaagaatctggtaaagatttttgagccctccggccggccagctgtggaccgtctgaacatcaccttctacgagaaccagatcaccgcattcctgggccacaatggagctgggaaaaccaccaccttgtccatcctgacgggtctgttgccaccaacctctgggactgtgctcgttgggggaagggacattgaaaccagcctggatgcagtccggcagagccttggcatgtgtccacagcacaacatcctgttccaccacctcacggtggctgagcacatgctgttctatgcccagctgaaaggaaagtcccaggaggaggcccagctggagatggaagccatgttggaggacacaggcctccaccacaagcggaatgaagaggctcaggacctatcaggtggcatgcagagaaagctgtcggttgccattgcctttgtgggagatgccaaggtggtgattctggacgaacccacctctggggtggacccttactcgagacgctcaatctgggatctgctcctgaagtatcgctcaggcagaaccatcatcatgtccactcaccacatggacgaggccgacctccttggggaccgcattgccatcattgcccagggaaggctctactgctcaggcaccccactcttcctgaagaactgctttggcacaggcttgtacttaaccttggtgcgcaagatgaaaaacatccagagccaaaggaaaggcagtgaggggacctgcagctgctcgtctaagggtttctccaccacgtgtccagcccacgtcgatgacctaactccagaacaagtcctggatggggatgtaaatgagctgatggatgtagttctccaccatgttccagaggcaaagctggtggagtgcattggtcaagaacttatcttccttcttccaaataagaacttcaagcacagagcatatgccagccttttcagagagctggaggagacgctggctgaccttggtctcagcagttttggaatttctgacactcccctggaagagatttttctgaaggtcacggaggattctgattcaggacctctgtttgcgggtggcgctcagcagaaaagagaaaacgtcaacccccgacacccctgcttgggtcccagagagaaggctggacagacaccccaggactccaatgtctgctccccaggggcgccggctgctcacccagagggccagcctcccccagagccagagtgcccaggcccgcagctcaacacggggacacagctggtcctccagcatgtgcaggcgctgctggtcaagagattccaacacaccatccgcagccacaaggacttcctggcgcagatcgtgctcccggctacctttgtgtttttggctctgatgctttctattgttatccctccttttggcgaataccccgctttgacccttcacccctggatatatgggcagcagtacaccttcttcagcatggatgaaccaggcagtgagcagttcacggtacttgcagacgtcctcctgaataagccaggctttggcaaccgctgcctgaaggaagggtggcttccggagtacccctgtggcaactcaacaccctggaagactccttctgtgtccccaaacatcacccagctgttccagaagcagaaatggacacaggtcaacccttcaccatcctgcaggtgcagcaccagggagaagctcaccatgctgccagagtgccccgagggtgccgggggcctcccgcccccccagagaacacagcgcagcacggaaattctacaagacctgacggacaggaacatctccgacttcttggtaaaaacgtatcctgctcttataagaagcagcttaaagagcaaattctgggtcaatgaacagaggtatggaggaatttccattggaggaaagctcccagtcgtccccatcacgggggaagcacttgttgggtttttaagcgaccttggccggatcatgaatgtgagcgggggccctatcactagagaggcctctaaagaaatacctgatttccttaaacatctagaaactgaagacaacattaaggtgtggtttaataacaaaggctggcatgccctggtcagctttctcaatgtggcccacaacgccatcttacgggccagcctgcctaaggacaggagccccgaggagtatggaatcaccgtcattagccaacccctgaacctgaccaaggagcagctctcagagattacagtgctgaccacttcagtggatgctgtggttgccatctgtgtgattttctccatgtccttcgtcccagccagctttgtcctttatttgatccaggagcgggtgaacaaatccaagcacctccagtttatcagtggagtgagccccaccacctactgggtgaccaacttcctctgggacatcgtgaattattccgtgagtgctgggctggtggtgggcatcttcatcgggtttcagaagaaagcctacacttctccagaaaaccttcctgcccttgtggcactgctcctgctgtatggatgggcggtcattcccatgatgtacccagcatccttcctgtttgatgtccccagcacagcctatgtggctttatcttgtgctaatctgttcatcggcatcaacagcagtgctattaccttcatcttggaattatttgagaataaccggacgctgctcaggttcaacgccgtgctgaggaagctgctcattgtcttcccccacttctgcctgggccggggcctcattgaccttgcactgagccaggctgtgacagatgtctatgcccggtttggtgaggagcactctgcaaatccgttccactgggacctgattgggaagaacctgtttgccatggtggtggaaggggtggtgtacttcctcctgaccctgctggtccagcgccacttcttcctctcccaatggattgccgagcccactaaggagcccattgttgatgaagatgatgatgtggctgaagaaagacaaagaattattactggtggaaataaaactgacatcttaaggctacatgaactaaccaagatttatccgggcacctccagcccagcagtggacaggctgtgtgtcggagttcgccctggagagtgctttggcctcctgggagtgaatggtgccggcaaaacaaccacattcaagatgctcactggggacaacacagtgacctcaggggatgccaccgtagcaggcaagagtattttaaccaatatttctgaagtccatcaaaatatgggctactgtcctcagtttgatgcaatcgatgagctgctcacaggacgagaacatctttacctttatgcccggcttcgaggtgtaccagcagaagaaatcgaaaaggttgcaaactggagtattaagagcctgggcctgactgtctacgccgactgcctggctggcacgtacagtgggggcaacaagcggaaactctccacagccatcgcactcattggctgcccaccgctggtgctgctggatgagcccaccacagggatggacccccaggcacgccgcatgctgtggaacgtcatcgtgagcatcatcagagaagggagggctgtggtcctcacatcccacagcatggaagaatgtgaggcactgtgtacccggctggccatcatggtaaagggcgcctttcgatgtatgggcaccattcagcatctcaagtccaaatttggagatggctatatcgtcacaatgaagatcaaatccccgaaggacgacctgcttcctgacctgaaccctgtggagcagttcttccaggggaacttcccaggcagtgtgcagagggagaggcactacaacatgctccagttccaggtctcctcctcctccctggcgaggatcttccagctcctcctctcccacaaggacagcctgctcatcgaggagtactcagtcacacagaccacactggaccaggtgtttgtaaattttgctaaacagcagactgaaagtcatgacctccctctgcaccctcgagctgctggagccagtcgacaagcccaggactgatctttcacaccgttcgttcctgcagccagaaaggaactctgggcagctggaggcgcaggagcctgtgcccatatggtcatccaaatggactggccagcgtaaatgaccccactgcagcagaaaacaaacacacgaggagcatgcagcgaattcagaaagaggtctttcagaaggaaaccgaaactgacttgctcacctggaacacctgatggtgaaaccaaacaaatacaaaatccttctccagaccccagaactagaaaccccgggccatcccactagcagctttggcctccatattgctctcatttcaagcagatctgcttttctgcatgtttgtctgtgtgtctgcgttgtgtgtgattttcatggaaaaataaaatgcaaatgcactcatcacaaaaaaaaaaaaaaaaa

SEQ ID NO: 22668 - DNA, 4152 bp, Homo Sapiens
atcactttggaagccggggggaacactttgccctgccctgagagctggtctgcgtttcccaggcgcggcggcggcggagcagcagctgcagcagccgagtccaaataggagcggccacagccaggggcgtgtgcgccccgcgcggagcgagctcgggttcccctcggaatgtccccggggcgcccggcgcgctgaccccgaagccgcctccgccttcggcgcctgctgcctccctcggccaggcttgttgttcgggactgtgagcttcctggctcctgggcagtggggaagcccccgggggcgagtgacctcagctggccacgacccagccctcccccgtgcgtatctcgcttaagatggcagcggagtcagggaactaatcggggcttgtgagttcatgaaagatcggttatattttgctactttaaggaatagaccaaaaagcacagtaaatacccactatttctccatcgatgaggagctggtctatgaaaatttctatgcagattttggaccgctgaacttggcaatggtgtacagatattgctgcaaactaaacaagaaactaaaatcatacagtttgtcaagaaagaaaatagtgcactacacctgttttgaccaacggaaaagagcaaatgcagcatttttgataggtgcctatgcagtaatctatttaaagaagacaccagaagaagcctacagagcactcctgtctggctcaaaccccccctatcttccattcagggatgcttcctttggaaattgcacttacaatctcaccattctcgactgtttgcagggaatcagaaagggattacaacatggattttttgactttgagacaattgatgtggatgaatatgaacattatgagcgagttgaaaatggtgacttcaactgtattgttccaggaaaatttttagcatttagtggaccacatcctaaaagcaaaattgagaatggttatcctcttcacgcccctgaagcctactttccttatttcaaaaagcataatgtgactgcagttgtgaggctaaacaaaaagatttatgaggcaaagcgcttcacagacgctggcttcgagcactatgacctcttcttcatagatggcagcacacccagtgacaacatcgtgcgaaggttcctgaacatctgtgagaacaccgaaggggccatcgccgttcactgcaaagctggtcttggaagaacagggacattgatagcctgttatgtaatgaaacactacaggtttacacatgctgaaataattgcttggattagaatatgccggccaggctctattataggaccccagcagcacttcctggaagaaaaacaagcatcgttgtgggtccaaggagacattttccgatccaaactgaaaaatcgaccatccagtgaaggaagtattaataaaattctttctggcctagatgatatgtctattggtggaaatctttcaaaaacacaaaacatggaacgatttggagaggataacttagaagatgatgatgtggaaatgaaaaatggtataacccagggagacaaactacgtgccttaaaaagtcagagacagccacgtacctcaccatcctgtgcatttaggtcagatgatacaaaaggacatccaagagcagtgtcccagcctttcagattaagttcatccctgcaaggatctgcagttactttgaagacatcaaaaatggcactgtccccttcagcaacggccaagaggatcaacagaacttctttgtcttcgggtgccactgtaagaagcttttccataaactcccggctagccagttctctagggaacttgaatgctgcaacagatgatccagagaacaaaaagacctcctcatcctctaaggcaggcttcacagccagcccgtttaccaacctcttgaatggcagctcccagccaactaccagaaattaccctgagctcaacaataatcagtacaacagaagcagcaacagcaacgggggcaacctgaacagccccccaggcccccacagcgccaagacagaggagcacaccaccatcctccgaccctcctacaccgggctttcttcttcttcagcgagattcctgagccgttctatcccttcccttcagtctgaatatgttcattactaaggccttgccactccagtgaaagctgttcttctcttagacacaatttcttcatctggacgagcagtggagagggaaagcaacttcttgctggaagaatatctctgccttcttaccttaaattaaaaagagcactaagataacaccttcaagagacttgaaaacagaaaactggttaatgactactataaatgcactgaaactatgttatggagatttccatacttttaaagacagttttaatgttgaatttggtattttgaagggttatttttaatgtattttggtaatacatttattattatatttacatgtacagtgttacattatatatgtattgtgaactttaaaagactattttgataaatttataaatatataaaattatgtaaaaactacactatattttgatttagattttcctgctgtttgctaccaaaaatttgtattttaaatctgtttagttttagtatggttttgtctctaatgaataaataattccttcttattaagaagaagtaagggagaaagtttttagaaagtgatttttatgctcgcactataaatatggcaggtcagttcattcttttgggaagtcagtttagttacactgagtttatccaagtttatctctaccaagagtataatggcatgggatggcttatttaggacaattccctttcctattgtttttgttgctgagccaatttgagttagttttgcatcctggggggctttaaaatacagcatgcagtgaaagatcagaattcactgaatatttcttctgagagcatggtttcatggtttttctctatgaaatgactcaatattccaaatgtttttttttccttcctcctttcaaaagagttcttaacccaattaggatatcctgctttgggtatgaggttgttgttgcctgtaatcacacatggtttgacatcagttttaaatcaatggagagaaaaaactgaaaaagatgctgctaagtagttctctgtattaaaggagatatttttaaaacagggtacaaccccctgctgcacacgctagcatatctggaacctactatgaaaatgaaaggacccttataggtactcacagccctttcatgtaagtatgatctgatatttaggtcttcagaagcctgtaggtttcatttctatgaggaatcgaggagcgttacatcctgatatccttccaggctgcttaagaatggactgcttcgacactgaaagtgctagttaaatggattcatatgaagtgctttactcccaaccattgagttatttataatgtatttattaggggagggtaccttgagtctattatatatgcttcatcaaaacatcttgttcatgttttatgtttttaaaaaaggcatttgaatgaatgtttgactcaggtttgttaaattaacttcagtaactgcagtaccaaaaattacactcaactgatgaaaaaaacgaattgtatgatttaggaatcaaaaactaaaataagtggaattatgtatcttttctaaagttaaaaaagtaaaatattttattatgagttattataaaaattggttaattgtataggaagatgacagtatttttttcaagttatcataaaaagtaattcagatgacatttgagaagtaggggaaagggaatcatgttgacagttttagttctgtgaacactaatttgtgtgaagctattaaaatgattgtaaagttgactactgtaaatttcccataattatgtgtgtatatgtgtcatatgtatgtacatgtatatgtctaaaaattactttacacatgtgcctacatagacacaccaagaagtggatgtatataatatagaaagtatatagcaaagtaattttactctgataataaaaattgtttgacatgtattttgttatgaatagtttatcttccaaaagatattttgctctattttaaagtgtagaagaatacactgctaataaataataaaagttttattcaatttaaaaaaaaaaaaaaaaaa

SEQ ID NO: 22669 - DNA, 4007 bp, Homo Sapiens
  misc_feature (225)..(225): n is a, c, g, or t
gctctaggctccaaagtacctgggtattgtcccttcatcaagaaagccccacagctctggagggctctgataatcccgttgtcagctctctgaaaagacagcatggctattaccctacagcccagtgacctgatctttgagttcgcaagcaacgggatggatgatgatatccaccagctggaagacccctctgtgttcccagctgtgatcgtggagcaggtaccntaccctgatttactgcatctgtactcgggactggagttggacgacgttcacaatggcatcataacagacgggaccttgtgcatgacgcaggatcagatcctggaaggcagttttttgctgacagatgacaatgaggccacctcgcacaccatgtcaaccgcggaagtcttgctcaatatggagtctcccagcgatatcctggatgagaagcagatcttcagtacctccgaaatgcttccagactcggaccctgcaccagctgtcactctgcccaactacctgtttcctgcctctgagcccgatgccctgaacagggcgggtgacactagtgaccaggaggggcattctctggaggagaaggcctccagagaggaaagtgccaagaagactgggaaatcaaagaagagaatccggaagaccaagggcaaccgaagtacctcacctgtcactgaccccagcatccccattaggaagaaatcaaaggatggcaaaggcagcaccatctatctgtgggagttcctcctggctcttctgcaagacagaaacacctgtcccaagtacatcaagtggacccagcgagagaaaggcatcttcaaactggtggactccaaagctgtgtccaagctgtgggggaagcagaaaaacaagcctgacatgaactatgagacaatggggcgggcactaagatactactaccaaagaggcatactggccaaagtggaagggcagaggctggtgtaccagtttaaggagattgccaaggacctggtggtcattgaagatgaggatgagagcagcgaggccacagcagccccacctcaggcctccacggcctctgtggcctctgccagtaccacccggcgaaccagctccaggggtctcatccagatctgccccccagggcaagggcagctcttcttgggagaagccaaaaattcagcatgtcggtctccagccatctgcgagtctggaattgggaccgtcgctaggcaaggagatccccactacctccaccatgctcgtctctccagcagagggccaggtcaagctcaccaaagctgtgagtgcatcttcagtgcccagcaacatccacctaggagtggcccccgtgggtcgggctcggccctgaccctgcagacgatcccactgaccacggtgctgaccaatgggcctcctgccagtactactgctcccactcagctcgttctccagagtgttccagcggcctctactttcaaggacaccttcactttgcaggcctctttccccctgaacgccagtttccaagacagccaggtggcagccccaggggctccactgattctcagtggcctcccccaacttctggctggggccaaccgtccgaccaacctggcgccacccacggtcacaggggctggaccagcagggcccagctctcagccccctgggactgttattgctgccttcatcaggacttctggcactacagcagcccctagggtcaaggaggggccactgaggtcctcctcctatgttcagggtatggtgacgggggcccccatggaggggctgctggttcctgaagagaccctgagggagctcctgagagatcaggctcatcttcagccacttccaacccaggtggtttccaggggttcccacaatccgagccttctgggcaaccagactttgtctcctcccagccgccccactgttgggctgaccccagtggctgaacttgagctctcctcaggctcagggtccctgctgatggctgagcctagtgtgaccacatctgggagccttctgacaagatcccccaccccagcccctttctccccattcaaccctacttccctcattaagatggagccccatgacatataagcaaaggggtcagggcaagtgtgacccaccaggcaaaattgagcagcattttcatagggaccgacttcagtagcacacctgcccctgcatttcagtgggatgtcaatacacttgaccccaagtcccccggccctgcctggtgtcactgtggccaaacagtgcccagcttaagcatccctggcatcagactatggccttcaagagcactagggcatatgcttttggcagcataacgggctgacttggtgatggagggaaaaagccttgagccaggcagaagtttgtggccagggtttgtgcagcagctttgtgagaagagcccttctacctggctctatctcactggctgcattccctacacagggaatttactaccctatatgtgaatatccctgtatgtacttgtgtgtacttgttggtctgtatcttagtttctttggggaggacagggctgtagctgtgaggtcttgtctccaagggtgtgtgtatgtctccgtggatcagccacagggatagggattttgtttttaagggaaagcattctctaattccctttgttcatgccgagattcagttgctctgagactatggggtacaagtttgatcctccgaatctggagatgttgtagagctggaacgagtgcagagtaggaacgctttgatgcgcatgcacattggggaagatgcgctcctcagggacacaaaggccgagtggggtaaaaccacgaagggagggaagggaagtcagctctgggagcagccctcactggctggaccaaggtactcttcctggagtttgccgtgttagcaacmacagtcaccttgcagtcaggctggaatcttgggccaccccaaagtgctttgctgaaggatttagacggggatgaagtgccctccagcctcagagctagccacaaagcccccagagctgaattcattgagtatttgtgcctagggcttgggctgtttgtgtgataccggccccccgccagacaatagcctttgtgacgccccagcctacttccccgatcctgggctccctcttgatcactttttgacattttccagctgtcaggcatcactgcggctagtccggcagcgacctagatggggtccacccccattcctgctcaagcatgggcacctaccacatggtttctgctgctcagcctgcctgcaactcacctcgaaggcggaccagcctgcctctgtgatgactgcagcagacctccttgggtgtaccaatgcccctcatctcccactttcacacctaaccctgactccttcaccaagaagacgggagtcggcagccaggagttcccgtggcacctctctctcttcgtggctccctgcttcccccttccctctttccgaggaagggtcaacctattctctctcaaagccaacccctaggccaattgcctggatctcctcccctctcccttctttaaacgagcttgcctccctcctgccaagtttgagggcaaggctaagaaatgtcagccacggaaacaactctattatctggtgactttgggtaatgtgaatcagtgcctgaggacctttgctgtggccttggtacagaaccatccacttgacctaactacctcccctggccgcgctctcgctcttctcttctttgttaagccaacaactatcaccctctcctactcttcttctccctgccccctggagggcactgtgtttggttgtgcaaatgtatttactatgcgtgtttccagcagttggcattaaagtgcctttttctaataaaatcagtttattagcaaaaaaaaaaaaaaaaaaaaaaaaaaaaagcagccgctgaattctagacctgcccgggcggccgctcgagccctatagtgagtaatcgaattcctgcagcccgggggatccactagttctagacg

SEQ ID NO: 22670 - DNA, 4856 bp, Homo Sapiens
aaagcaaaagaattcgctgcgtttccatgaaatcctgcggagtgtcgctcgctaccgccgccgctgccgccgccgctttcggtgatgaggaaaagaaaatggcggcgggaaaagcgagcggcgagagcgaggaggcgtcccccagcctgacagccgaggagagggaggcgctcggcggactggacagccgcctctttgggttcgtgagatttcatgaagatggcgccaggacgaaggccctactgggcaaggctgttcgctgctatgaatctctaatcttaaaagctgaaggaaaagtggagtctgatttcttttgtcaattaggtcacttcaacctcttattggaagattatccaaaagcattatctgcataccagaggtactacagtttacagtctgactactggaagaatgctgcctttttatatggtcttggtttggtctacttccattataatgcatttcagtgggcaattaaagcatttcaggaggtgctttatgttgatcccagcttttgtcgagccaaggaaattcatttacgagttgggcttatgttcaaagtgaacacagactatgagtctagtttaaagcattttcagttagctttggttgactgtaatccctgcactttgtccaatgctgaaattcaatttcacattgcccacttatatgaaacccagaggaaatatcattctgcaaaagaagcttatgaacaacttttgcagacagagaatctttctgcacaagtaaaagcaactgtcttacaacagttaggttggatgcatcacactgtagatctcctgggagataaagccaccaaggaaagctatgctattcagtatctccaaaagtccttggaagcagatcctaattctggccagtcctggtatttcctcggaaggtgctattcaagtattgggaaagttcaggatgcctttatatcttacaggcagtctattgataaatcagaagcaagtgcagatacatggtgttcaataggtgtgctatatcagcagcaaaatcagcccatggatgctttacaggcctatatttgtgctgtacaattggaccatggccatgctgcagcctggatggacctaggcactctctatgaatcctgcaaccagcctcaggatgccattaaatgctacttaaatgcaactagaagcaaaagttgtagtaatacctctgcacttgcagcacgaattaagtatttacaggctcagttgtgtaaccttccacaaggtagtctacagaataaaactaaattacttcctagtattgaggaggcgtggagcctaccaattcccgcagagcttacctccaggcagggtgccatgaacacagcacagcagaatacttctgacaattggagtggtggacatgctgtgtcacatcctccagtacagcaacaagctcattcatggtgtttgacaccacagaaattacagcatttggaacagctccgcgcaaatagaaataatttaaatccagcacagaaactgatgctggaacagctggaaagtcagtttgtcttaatgcaacaacaccaaatgagaccaacaggagttgcacaggtacgatctactggaattcctaatgggccaacagctgactcatcactgcctacaaactcagtctctggccagcagccacagcttgctctgaccagagtgcctagcgtctctcagcctggagtccgtcctgcctgccctgggcagcctttggccaatggacccttttctgcaggccatgttccctgtagcacatcaagaacgcggggaagtacagacactattttgataggcaataatcatataacaggaaatggaagtaatggaaacgtgccttacctgcagcgaaacgcactcactctacctcataaccgcacaaacctgaccagcagcgcaaaggagccgtggaaaaaccaactatctaactccactcaggggcttcacaaaggtcagagttcacattcggcaggtcctaatggtgaacgacctctctcttccactgggccttcccagcatctccaggcagctggctctggtattcagaatcagaacggacatcccaccctgcctagcaattcagtaacacagggggctgctctcaatcacctctcctctcacactgctacctcaggtggacaacaaggcattaccttaaccaaagagagcaagccttcaggaaacatattgacggtgcctgaaacaagcaggcacactggagagacacctaacagcactgccagtgtcgagggacttcctaatcatgtccatcagatgacggcagatgctgtttgcagtcctagccatggagattctaagtcaccaggtttactaagttcagacaatcctcagctctctgccttgttgatgggaaaagccaataacaatgtgggtactggaacctgtgacaaagtcaataacatccacccagctgttcatacaaagactgataactctgttgcctcttcaccatcttcagccatttcaacagcaacaccttctccaaaatccactgagcagacaaccacaaacagtgttaccagccttaacagccctcacagtgggctacacacaattaatggagaagggatggaagaatctcagagccccatgaaaacagatctgcttctggttaaccacaaacctagtccacagatcataccatcaatgtctgtgtccatataccccagctcagcagaagttctgaaggcatgcaggaatctaggtaaaaatggcttatctaacagtagcattttgttggataaatgtccacctccaagaccaccatcttcaccataccctcccttgccaaaggacaagttgaatccacctacacctagtatttacttggaaaataaacgtgatgctttctttcctccattacatcaattttgtacaaatccgaacaaccctgttacagtaatacgtggccttgctggagctcttaagttagacctgggacttttctctactaaaactttggtggaagctaacaatgaacatatggtagaagtgaggacacagttgttgcagccagcagatgaaaactgggatcccactggaacaaagaaaatctggcattgtgaaagtaatagatctcatactacaattgctaaatatgcacagtaccaggcctcctcattccaggaatcattgagagaagaaaatgaaaaaagaagtcatcataaagaccactcagatagtgaatctacatcgtcagataattctgggaggaggaggaaaggaccctttaaaaccataaagtttgggaccaatattgacctatctgatgacaaaaagtggaagttgcagctacatgagctgactaaacttcctgcttttgtgcgtgtcgtatcagcaggaaatcttctaagccatgttggtcataccatattgggcatgaacacagttcaactatacatgaaagttccagggagcagaacaccaggtcatcaggaaaataacaacttctgttcagttaacataaatattggcccaggtgactgtgaatggtttgttgttcctgaaggttactggggtgttttgaatgacttctgtgaaaaaaataatttgaatttcctaatgggttcttggtggcccaatcttgaagatctttatgaagcaaatgttccagtgtataggtttattcagcgacctggagatttggtctggataaatgcaggcactgttcattgggttcaggctattggctggtgcaacaacattgcttggaatgttggtccacttacagcctgccagtataaattggcagtggaacggtacgaatggaacaaattgcaaagtgtgaagtcaatagtacccatggttcatctttcctggaatatggcacgaaatatcaaggtctcagatccaaagctttttgaaatgattaagtattgtcttctaagaactctgaagcaatgtcagacattgagggaagctctcattgctgcaggaaaagagattatatggcatgggcggacaaaagaagaaccagctcattactgtagcatttgtgaagtggaggtttttgatctgctttttgtcactaatgagagtaattcacgaaagacctacatagtacattgccaagattgtgcacgaaaaacaagcggaaacttggaaaactttgtggtgctagaacagtacaaaatggaggacctgatgcaagtctatgaccaatttacattagctcctccattaccatccgcctcatcttgatattgttccatggacattaaatgagaccttttctgctattcaggaaataacccagttctgcaccactggtttttgtagctatctcgtaaggctgctggctgaaaactgtgtctatgcaaccttccaagtgcggagtgtcaaccaactggacgggagagagtactgctcctactccaggactctcacaaagctgatgagctgtacttcagaaaaaaataataatttccatgttttgtatatatctgacaaaactggcaacatcttacagactactgacttgaagacaacctcttttatatttctctatttctgggctgatgaatttgttttcatctgtcttttcccccttcagaattttccttggaaaaaaaatactagcctagctggtcatttctttgtaaggtagttagcaattttaagtctttctttggtcaacttttttttaatgtgaaaagttaggtaagacacttttttactgcttttatgtttttctgtcttgttttgagaccatgatggttacacttttggttcctaaataaaatttaaaaaattaacagccaagtcacaaaggtaatggattgcacatagactaaggaataaacttcagatttgtgaaaaaaaaaa

SEQ ID NO: 22671 - DNA, 6476 bp, Homo Sapiens
gctcatcgtttgttgtttagataatatcatgaactgataaatgcagttgccacgttgattccctagggcctggcttaccgactgaggtcataagatattatgccttctctttagacttggtcagtggagaggaaatgggcaaagaaccagcctatggaggtgacaaggccttagggccaaaagtcttgagggtgaaggtttagggcctgcgcagcttccctgccatgccccgcaaggtctcgcattcgcaaggcttgtgacagtgggagcctcattacggactctcctaaagtccatggtgtcctcttttcgcatttgcgccccgtgggtgatgcccgatgccgcccttcccatcgctctcttccccttcaagcgtatcgcaactgcaaaaacacccagcacagacactccattttctatcttaatgcatttaactagcacaacctacaggttgttccatcccagagactacccttttctccatagacgtgaccatcaaccaaccagcggtcagaatcagtcagcctctgtcatgttcctaggtccttggcgaactggctgggcggggtcccagcagcctaggagtacagtggagcaatgcctgacgtaagtcaacaaagatcacgtgagacgaatcagtcgcctagattggctacaactaagtggttgggagcggggaggtcgcggcggctgcgtggggttcgcccgtgacacaattacaactttgtgctggtgctggcaaagtttgtgattttaagaaattctgctgtgctctccagcactgcgagcttctgccttccctgtagtttcccagatgtgatccaggtagccgagttccgctgcccgtgcttcggtagcttaagtctttgcctcagcttttttccttgcagccgctgaggaggcgataaaattggcgtcacagtctcaagcagcgattgaaggcgtcttttcaactactcgattaaggttgggtatcgtcgtgggacttggaaatttgttgtttccatgaaatcctgcgcagtgtcgctcactaccgccgctgttgccttcggtgatgaggcaaagaaaatggcggaaggaaaagcgagccgcgagagtgaagaggagtctgttagcctgacagtcgaggaaagggaggcgcttggtggcatggacagccgtctcttcgggttcgtgaggcttcatgaagatggcgccagaacgaagaccctactaggcaaggctgttcgctgctacgaatctttaatcttaaaagctgaaggaaaagtggagtctgacttcttttgccaattaggtcacttcaacctcttgttggaagattattcaaaagcattatctgcatatcagagatattacagtttacaggctgactactggaagaatgctgcgtttttatatggccttggtttggtctacttctactacaatgcatttcattgggcaattaaagcatttcaagatgtcctttatgttgaccccagcttttgtcgagccaaggaaattcatttacgacttgggctcatgttcaaagtgaacacagactacaagtctagtttaaagcattttcagttagccttgattgactgtaatccatgtactttgtccaatgctgaaattcaatttcatattgcccatttgtatgaaacccagaggaagtatcattctgcaaaggaggcatatgaacaacttttgcagacagaaaaccttcctgcacaagtaaaagcaactgtattgcaacagttaggttggatgcatcataatatggatctagtaggagacaaagccacaaaggaaagctatgctattcagtatctccaaaagtctttggaggcagatcctaattctggccaatcgtggtattttcttggaaggtgttattcaagtattgggaaagttcaggatgcctttatatcttacaggcaatctattgataaatcagaagcaagtgcagatacatggtgttcaataggtgtgttgtatcagcagcaaaatcagcctatggatgctttacaggcatatatttgtgctgtacaattggaccatgggcatgccgcagcctggatggacctaggtactctctatgaatcctgcaatcaacctcaagatgccattaaatgctacctaaatgcagctagaagcaaacgttgtagtaatacctctacgcttgctgcaagaattaaatttctacagaatggttctgataactggaatggtggccagagtctttcacatcatccagtacagcaagtttattcgttgtgtttgacaccacagaaattacagcacttggaacaactgcgagcaaatagagataatttaaatccagcacagaagcatcagctggaacagttagaaagtcagtttgtcttaatgcagcaaatgagacacaaagaagttgctcaggtacgaactactggaattcataacggggccataactgattcatcactgcctacaaactctgtctctaatcgacaaccacatggtgctctgaccagagtatctagcgtctctcagcctggagttcgccctgcttgtgttgaaaaacttttgtccagtggagctttttctgcaggctgtattccttgtggcacatcaaaaattctaggaagtacagacactatcttgctaggcagtaattgtatagcaggaagtgaaagtaatggaaatgtgccttacctgcagcaaaatacacacactctacctcataatcatacagacctgaacagcagcacagaagagccatggagaaaacagctatctaactccgctcaggggcttcataaaagtcagagttcatgtttgtcaggacctaatgaagaacaacctctgttttccactgggtcagcccagtatcaccaggcaactagcactggtattaagaaggcgaatgaacatctcactctgcctagtaattcagtaccacagggggatgctgacagtcacctctcctgtcatactgctacctcaggtggacaacaaggcattatgtttaccaaagagagcaagccttcaaaaaatagatccttggtgcctgaaacaagcaggcatactggagacacatctaatggctgtgctgatgtcaagggactttctaatcatgttcatcagttgatagcagatgctgtttccagtcctaaccatggagattcaccaaatttattaattgcagacaatcctcagctctctgctttgttgattggaaaagccaatggcaatgtgggtactggaacctgcgacaaagtgaataatattcacccagctgttcatacaaagactgatcattctgttgcctcttcaccctcttcagccatttccacagcaacaccttctcctaaatccactgagcagagaagcataaacagtgttaccagccttaacagtcctcacagtggattacacacagtcaatggagaggggctggggaagtcacagagctctacaaaagtagacctgcctttagctagccacagatctacttctcagatcttaccatcaatgtcagtgtctatatgccccagttcaacagaagttctgaaagcatgcaggaatccaggtaaaaatggcttgtctaatagctgcattttgttagataaatgtccacctccaagaccaccaacttcaccatacccacccttgccaaaggacaagttgaatccacccacacctagtatttacttggaaaataaacgtgatgctttctttcctccattacatcaattttgtacaaatccaaaaaaccctgttacagtaatacgtggccttgctggagctcttaaattagatcttggacttttctctaccaaaactttggtagaagctaacaatgaacatatggtagaagtgaggacacagttgctgcaaccagcagatgaaaactgggatcccactggaacaaagaaaatctggcgttgtgaaagcaatagatctcatactacaattgccaaatacgcacaataccaggcttcctccttccaggaatcattgagagaagaaaatgagaaaagaacacaacacaaagatcattcagataacgaatccacatcttcagagaattctggaaggagaaggaaaggaccttttaaaaccataaaatttgggaccaacattgacctctctgataacaaaaagtggaagttgcagttacatgaactgactaaacttcctgcttttgcgcgtgtggtgtcagcaggaaatcttctaacccatgttgggcataccattctgggcatgaatacagtacaactgtatatgaaagttccagggagtcggacaccaggtcaccaagaaaataacaacttctgctctgttaacataaatattggtccaggagattgtgaatggtttgttgtacctgaagattattggggtgttctgaatgacttctgtgaaaaaaataatttgaattttttaatgagttcttggtggcccaaccttgaagatctttatgaagcaaatgtccctgtgtatagatttattcagcgacctggagatttggtctggataaatgcaggcactgtgcattgggttcaaactgttggctggtgcaataacattgcctggaatgttggtccacttacagcctgccagtataaattggcagtggaacggtatgaatggaacaaattgaaaagtgtgaagtcaccagtacccatggtgcatctttcctggaatatggcacgaaatatcaaagtctcagatccaaagctttttgaaatgattaagtattgtcttttgaaaattctgaagcaatatcagacattgagagaagctcttgttgcagcaggaaaagaggttatatggcatgggcggacaaatgatgaaccagctcattactgtagcatttgtgaggtggaggtttttaatctgctttttgtcactaatgaaagcaatactcaaaaaacctacatagtacattgccatgattgtgcacgaaaaacaagcaaaagtttggaaaattttgtggtgctcgaacagtacaaaatggaggacctaatccaagtttatgatcaatttacactagctctttcattatcatcctcatcttgatatagttccatgaatattaaatgagattatttctgctcttcaggaaatttctgcaccactggttttgtagctgtttcataaaactgttgactaaaagctatgtctatgcaaccttccaagaatagtatgtcaagcaactggacacagtgctgcctctgcttcaggacttaacatgctgatccagctgtacttcagaaaaataatattaatcatatgttttgtgtacgtatgacaaactgtcaaagtgacacagaatactgatttgaagatagccttttttatgtttctctatttctgggctgatgaattaatattcatttgtattttaaccctgcagaattttccttagttaaaaacactttcctagctggtcatttcttcataagatagcaaatttaaatctctcctcgatcagcttttaaaaaatgtgtactattatctgaggaagttttttactgctttatgtttttgtgtgttttgaggccatgatgattacatttgtggttccaaaataatttttttaaatattaatagcccatatacaaagataatggattgcacatagacaaagaaataaacttcagatttgtgatttttgtttctaaacttgatacagatttacactatttataaatacgtatttattgcctgaaaatatttgtgaatggaatgttgtttttttccagacgtaactgccattaaatactaaggagttctgtagttttaaacactactcctattacattttatatgtgtagataaaactgcttagtattatacagaaatttttattaaaattgttaaatgtttaaagggtttcccaatgtttgagtttaaaaaagactttctgaaaaaatccactttttgttcattttcaaacctaatgattatatgtattttatatgtgtgtgtatgtgtacacacatgtataatatatacagaaacctcgatatataattgtatagattttaaaagttttattttttacatctatggtagtttttgaggtgcctattataaagtattacggaagtttgctgtttttaaagtaaatgtcttttagtgtgatttattaagttgtagtcaccatagtgatagcccataaataattgctggaaaattgtattttataacagtagaaaacatatagtcagtgaagtaaatattttaaaggaaacattatatagatttgataaatgttgtttataattaagagtttcttatggaaaagagattcagaatgataacctcttttagagaacaaataagtgacttatttttttaaagctagatgactttgaaatgctatactgtcctgcttgtacaacatggtttggggtgaaggggaggaaagtattaaaaaatctatatcgctagtaaattgtaataagttctattaaaacttgtatttcatatgaaaaaaaaaa

SEQ ID NO: 22672 - DNA, 669 bp, Homo Sapiens
cattttttgtgttctcgcagatttccaaagcgggaaaggaaatcaaggagtacgtggaggcccaagcaggaaacgatccttttctcaaaggcatccctgaggacaagaatcccttcaaggagaaaggtggctgtctgataagctgatggcatggagccctgccctgagtgtctgtccctcttcagccaagcccaagtctcctagacccccagggagccagtgaactgtcaccttctcttcatcacagaatgagtaaagatccctgaacaaatgcattgtgaacccattccccactcccaccttcaactcttttctcccattatttcctccacctgctgggtctctgctgaccttgctgggaacactctgaggacagtgtggctggccgagcggttggccccatgggtggtggggtgtgagaagcctgcaataccccaagaccccagagggcagtccttaggaagcacttacaccacctgggaacccctccgtcttttccctctactctcatcctaggaataaagcatttccacgccagagtagtttgggctgggggccagggttgggtgggtcctgtccctccatatcatgtcctaccctatggtcctgttcctagtcatttagatcaccccagatggcctgatgacaacaagagtttgtgaagttatg

SEQ ID NO: 22673 - DNA, 3500 bp, Homo Sapiens
atggggatggcttgccttacgatgacagaaatggagggaacatccacctcttctatatatcagaatggtgatatttctggaaatgccaattctatgaagcaaatagatccagttcttcaggtgtatctttaccattcccttgggaaatctgaggcagattatctgacctttccatctggggagtatgttgcagaagaaatctgtattgctgcttctaaagcttgtggtatcacacctgtgtatcataatatgtttgctttaatgagtgaaacagaaaggatctggtatccacccaaccatgtcttccatatagatgagtcaaccaggcataatgtactctacagaataagattttactttcctcgttggtattgcagtggcagcaacagagcctatcggcatggaatatctcgaggtgctgaagctcctcttcttgatgactttgtcatgtcttacctctttgctcagtggcggcatgattttgtgcacggatggataaaagtacctgtgactcatgaaacacaggaagaatgtcttgggatggcagtgttagatatgatgagaatagccaaagaaaacgatcaaaccccactggccatctataactctatcagctacaagacattcttaccaaaatgtattcgagcaaagatccaagactatcatattttgacaaggaagcgaataaggtacagatttcgcagatttattcagcaattcagccaatgcaaagccactgccagaaacttgaaacttaagtatcttataaatctggaaactctgcagtctgccttctacacagagaaatttgaagtaaaagaacctggaagtggtccttcaggtgaggagatttttgcaaccattataataactggaaacggtggaattcagtggtcaagagggaaacataaagaaagtgagacactgacagaacaggatttacagttatattgcgattttcctaatattattgatgtcagtattaagcaagcaaaccaagagggttcaaatgaaagccgagttgtaactatccataagcaagatggtaaaaatctggaaattgaacttagctcattaagggaagctttgtctttcgtgtcattaattgatggatattatagattaactgcagatgcacatcattacctctgtaaagaagtagcacctccagccgtgcttgaaaatatacaaagcaactgtcatggcccaatttcgatggattttgccattagtaaactgaagaaagcaggtaatcagactggactgtatgtactacgatgcagtccgaaggactttaataaatattttctgacctttgctgtcgagcgagaaaatgtcattgaatataaacactgtttgattacaaaaaatgagaatgaagagtacaacctcagtgggacaaagaagaacttcagcagtcttaaagatcttttgaattgttaccagatggaaactgttcgctcagacaatataattttccagtttactaaatgctgtcccccaaagccaaaagataaatcaaaccttctagtcttcagaacgaatggtgtttctgatgtaccaacctcaccaacattacagaggcctactcatatgaaccaaatggtgtttcacaaaatcagaaatgaagatttgatatttaatgaaagccttggccaaggcacttttacaaagatttttaaaggcgtacggagagaagtaggagactacggtcaactgcatgaaacagaagttcttttaaaagttctggataaagcacacagaaactattcagagtctttctttgaagcagcaagtatgatgagcaagctttctcacaagcatttggttttaaattatggagtatgtgtctgtggagacgagaatattctggttcaggagtttgtaaaatttggatcactagatacatatctgaaaaagaataaaaattgtataaatatattatggaaacttgaagttgctaaacagttggcatgggccatgcattttctagaagaaaacacccttattcatgggaatgtatgtgccaaaaatattctgcttatcagagaagaagacaggaagacaggaaaccctcctttcatcaaacttagtgatcctggcattagtattacagttttgccaaaggacattcttcaggagagaataccatgggtaccacctgaatgcattgaaaatcctaaaaatttaaatttggcaacagacaaatggagttttggtacaactctgtgggaaatctgcagtggaggagataaacctctaagtgctctggattctcaaagaaagctacaattttatgaagataggcatcagcttcctgcaccaaagtgggcagaattagcaaaccttataaataattgtatggattatgaaccagatttcaggccttctttcagagccatcatacgagatcttaacagtttgtttactccagattatgaactattaacagaaaatgacatgttaccaaatatgaggataggtgccctagggttttctggtgcctttgaagaccgggatcctacacagtttgaagagagacatttgaaatttctacagcaacttggcaagggtaattttgggagtgtggagatgtgccggtatgaccctctacaggacaacactggggaggtggtcgctgtaaaaaagcttcagcatagtactgaagagcacctaagagactttgaaagggaaattgaaatcctgaaatccctacagcatgacaacattgtaaagtacaagggagtgtgctacagtgctggtcggcgtaatctaaagttaattatggaatatttaccatatggaagtttacgagattatcttcaaaaacataaagaacggatagatcacataaaacttctgcagtacacatctcagatatgcaagggtatggagtatcttggtacaaaaaggtatatccacagggatctggcaacgagaaatatattggtggagaacgagaacagagttaaaattggagattttgggttaaccaaagtcttgccacaagacaaagaatactataaagtaaaagaacctggtgaaagtcccatattctggtatgctccagaatcactgacagagagcaagttttctgtggcctcagatgtttggagctttggagtggttctgtatgaacttttcacatacattgagaagagtaaaagtccaccagcggaatttatgcgtatgattggcaatgacaaacaaggacagatgatcgtgttccatttgatagaacttttgaagaataatggaagattaccaagaccagatggatgcccagatgagatctatatgatcatgacagaatgctggaacaataatgtaaatcaacgcccctcctttagggatctagctcttcgagtggatcaagtaagggataacatggctggatgaaagaaatgaccttcattctgagaccaaagtagatttacagaacaaagttttatatttcacattgctgtggactattattacatatatcattattatataaa

SEQ ID NO: 22674 - DNA, 6227 bp, Homo Sapiens
cgcgccgccgctcgctcacctgcgctcccgcccgcccctcggtgcgcgcccggcccgccagccgccgccgcccgcaccccgagcgccaccatgaactcgctcttcaggaagagaaacaaaggcaaatacagccccactgtgcagacccggagcatctctaacaaggagctctcggagctgatcgagcagctgcagaagaatgccgaccaggtggagaagaacatcgtggacacagaggccaagatgcagagtgacctggctcggctgcaggagggtcggcagcctgagcaccgggacgtgaccctgcagaaggtgttggactctgagaagctgctctatgtgctagaggcggatgcggccattgccaagcacatgaagcacccacagggggacatgatcgccgaggatatccgccagctgaaggagcgtgtgaccaacctgcgcgggaaacacaagcagatctacaggctggcggtgaaggaagtggatccacaggtcaactgggcggcactggtggaggagaagctggacaagctgaacaaccagagctttgggactgacctgccgctggtggaccaccaagtggaggagcataacatcttccacaatgaggtcaaggccatcgggccccacctggccaaggacggggacaaggagcagaacagcgaactccgggccaagtaccagaaactgctggcagcatcacaggcccggcagcagcacctgagttcgctgcaggactacatgcagcgctgcaccaatgagctgtactggctggaccagcaggccaagggccgcatgcagtacgactggagtgaccgcaacctcgactaccccagccgccggcgccagtatgagaatttcatcaaccggaacctggaggccaaagaggagagaatcaacaaactgcacagcgagggcgaccagctgctggcggccgagcaccccgggaggaactccattgaggcgcacatggaggctgtgcacgcagactggaaggagtacctgaacctgctcatctgcgaggagagccacctcaagtacatggaggactaccaccagtttcacgaagacgtgaaggacgctcaggagctgctgcgcaaggtggactcggacctgaaccagaagtatggccctgacttcaaggaccggtaccagattgagctgctgctgcgggagctggatgaccaggagaaggtgctggacaagtatgaggacgtggtgcaggggctgcagaagcgaggccagcaggtggtgcccctcaagtaccgccgggagactccgctcaagcccatccccgtggaggcactctgtgactttgagggggagcagggcctgatctcgcggggctacagctacaccctgcagaagaacaacggggagagctgggagctcatggacagcgctgggaacaagctgattgctccggccgtctgttttgtgatcccccccacagaccctgaggccctggctctggctgacagcctgggcagccagtaccggagcgtgcggcagaaggcagctgggagcaaacgcacgctgcagcagcggtatgaggtgctgaagaccgagaatcccggagatgcctctgacctacaggggcggcagctgctggctggcttggacaaggtggccagcgacctggaccggcaggagaaggccatcacagggatcctgcggccaccactggagcaaggccgggctgtgcaggacagtgccgagcgggccaaggacctcaagaacatcaccaacgagctactgcggattgaacctgagaagacgcggagcacggctgagggcgaagccttcatccaggccctcccaggcagtggcaccacacccctgctgaggacccaggtggaggacaccaaccggaaatacgagcacctcctgcagctgctggacttggcccaggagaaggttgatgtggccaaccgcctggagaagagcctgcagcagagctgggagttgctggccacacacgagaaccatctgaatcaggatgacacagtgcctgagagcagccgtgtcctggacagcaaggggcaggagctggcggccatggcctgtgagttacaggcccagaagtccctcctgggtgaggtggagcagaacttgcaggcggccaagcagtgctcgagcacactggccagccgcttccaggagcactgcccggacctggagcgccaggaggccgaggtgcacaagctgggccagcgtttcaacaacctgcgccagcaggtggaacgcagggcgcagagcctacagagcgccaaggcagcctacgagcacttccaccgcggccatgaccacgtgctgcagttcctagtcagcatccccagttacgagccccaggagacagacagcctcagccagatggagaccaagctgaagaaccagaagaacctgctagatgagatagcaagtagggagcaggaagtacagaagatctgtgccaattcccagcagtaccagcaagctgtaaaggactatgagttagaagcagaaaaactaaggtctcttctcgacttggagaatggaaggagcagccacgtgagcaagagagccaggctccaatctcctgccaccaaagtgaaggaagaggaagcagcacttgccgccaagttcactgaagtttatgccatcaacagacagaggctgcagaatctggagtttgctctgaatctcctcagacagcagccggaagtagaagtgacccatgagaccctgcaaaggaataggccggactctggagtggaggaggcgtggaagatcaggaaggaactggatgaggagactgagcggaggcggcagctggagaacgaggtcaagagcacccaggaagaaatctggaccttgaggaatcaggggcctcaggaatcggtggtgaggaaggaggtgctcaagaaggtgccggatcccgtgctggaggagagcttccagcagctgcagcggacgctggcagaggagcagcacaagaaccagctgctgcaggaggagctggaggcactgcagctgcagctgcgtgccctggagcaggagaccagagacggggggcaggagtacgtgttcaaggaggtcctgcgcatcgagcctgacagggcccaggcggatgaggtcttgcagctgcgggaggagctggaggcactgaggcggcagaagggcgcccgggaggcagaggtgctcctcctgcagcagcgtgtggccgccctggctgaagagaagagccgggcgcaggagaaggtcacagagaaagaggtggtgaaactgcagaatgacccccagctggaggcagagtaccagcagctgcaggaggaccaccagcgccaggaccagctcagggagaagcaggaggaggagctgagcttcctccaggacaagctcaagaggctagagaaggagcgggccatggccgagggcaagatcaccgtcaaggaggtgctcaaggtggagaaggacgcggccaccgagagggaggtcagcgatctcacccgccaatatgaggacgaggctgccaaggctcgcgctagccagagggagaagacggagctgctccgaaagatatgggccttggaggaggagaacgccaaagtggtggtgcaggagaaggtgcgggagatcgtgcggccagaccccaaggcggaaagtgaagtggcgaacctccgcctggagcttgtggagcaggagcgaaagtaccggggtgccgaggagcagctccggagctaccagagtgagctggaggccctcaggaggcgaggcccccaggtggaagtcaaagaggtgactaaggaagtcattaagtacaagactgaccctgagatggagaaggagcttcagcggctcagggaggagatcgtggacaagaccagactgatcgaaaggtgtgatttagagatctaccagctgaaaaaggaaatccaggccctgaaagacaccaaaccccaggtccagaccaaagaggtggtccaggagatcctccaattccaagaagaccctcaaaccaaggaggaggtggcgtctctgagggcaaagctctcagaggagcagaagaaacaagtggatctggagagggaaagagcttcccaggaagagcagatcgcccggaaagaggaggagctctcgcgggtgaaggaaagggtggtgcagcaggaggtggtcaggtatgaggaggagccaggcctccgggccgaggcgagtgcctttgccgagagcatcgatgtggagctgcggcagattgacaagctgcgggcagagctgcggcggctgcagcgccggcgcaccgagcttgagcggcagctggaggagctagagcgcgagcggcaggcccgcagggaggccgagcgcgaggtacagcggttgcagcagcggctggcagcgctggagcaggaagaagctgaggcccgtgagaaggtaacccatacgcagaaggtggtgctgcagcaggacccgcagcaggcgcgagagcatgccctgctccgactccagctggaagaagagcagcaccggcggcagctcctggagggggagctcgagaccctccggaggaaactggctgcactggagaaggcggaggtcaaggagaaggtggtgctctccgagagtgtccaggtggagaagggcgacaccgagcaagagatccagaggctcaagagcagcctggaggaggagagccgcagcaagcgcgagctggacgtcgaggtgagccggctggaagccaggctttcggagctggaattccataactccaagtcatccaaggaactagactttctgagggaagagaaccacaaattacagctggagaggcaaaacctgcagctggagacccgaaggctccaatcggaaatcaacatggcagcgacggaaacacgagacctgcggaacatgaccgtggcggactctgggaccaaccatgactccagactgtggtccctggagagggaactggatgacctcaagaggctctccaaggacaaagacctcgagatcgacgagctgcagaagcgcctgggctccgtggccgtcaagcgggagcagcgggagaaccacctgcggcgctccatcgtagtcatccaccttgacacaggccgcgagctgtccccggaggaagcccaccgtgccgggctcattgactggaacatgttcgtgaaactcagaagccaggagtgcgactgggaggagatctcagtgaagggtcccaatggggagtcctcagtgatacacgacaggaagtctggcaagaagttctccatcgaagaggccctgcagagtggcaggctgacccctgctcagtatgaccgctatgtcaacaaggatatgtccatccaggagctggcggtcttggtatctgggcagaagtaggcacagctcttgcaactcttcgtaacggcagacgctggccctctcctacgacgcagtgacctccttggtgtcgtcctctccctagccctggtgcaggccaagcattttatacataccctcgctgccaggctgctcagagtcccgcccacatatgagacaggcactggctgaagacaggcaactctcgtcccaaccatcattcaccctgagtgacgtacttcatcctccaatgactggacaactgcgatgccttttcctcccttttcctgtacactcccagcaacaaactcctcatgataactgcacacaatctgaaaaccactgaaggacaagccaaccacagcagccaagcccactccttgcagcatgggtactggtggcacaccagacagtgacactgccccacaaaggcctgggcccgtgggggctgctgcctggcatgacatctctccagatttctggcttaaaacaactttccatccgagaagcctcctcagtagttactctgctcatgagacagatctgggctccaagccaggaaaggtgaacagaaaccacaagtgtccagccctcggtgctggagtggacgttaattgtcagccaccagactgtcccggcacctacagagaatgtttcacagttctggcatttaaatcctttgatagtggattgtgctgctgttagccttagtttcagtgctttacaagtctcgcttattatctcattggtatttaggtatacaaaacagttgattattcaccacgccaatatctgggtctctgtatctcatgtagaacataagaaaatgggaactaatagggaactttatttatagcatgaaaataaacctggtggctggagtctga

SEQ ID NO: 22675 - DNA, 14709 bp, Homo Sapiens
agggaattctctggggctttggggaatttagtgcgtgggtgagccaagaaaatactaattaataatagtaagttgttagtgttggttaagttgttgcttggaagtgagaagttgcttagaaactttccaaagtgcttagaactttaagtgcaaacagacaaactaacaaacaaaaattgttttgctttgctacaaggtggggaagactgaagaagtgttaactgaaaacaggtgacacagagtcaccagttttccgagaaccaaagggaggggtgtgtgatgccatctcacaggcaggggaaatgtctttaccagcttcctcctggtggccaagacagcctgtttcagagggttgttttgtttggggtgtgggtgttatcaagtgaattagtcacttgaaagatgggcgtcagacttgcatacgcagcagatcagcatccttcgctgccccttagcaacttaggtggttgatttgaaactgtgaaggtgtgattttttcaggagctggaagtcttagaaaagccttgtaaatgcctatattgtgggcttttaacgtatttaagggaccacttaagacgagattagatgggctcttctggatttgttcctcatttgtcacaggtgtcttgtgattgaaaatcatgagcgaagtgaaattgcattgaatttcaagggaatttagtatgtaaatcgtgccttagaaacacatctgttgtcttttctgtgtttggtcgatattaataatggcaaaatttttgcctatctagtatcttcaaattgtagtctttgtaacaaccaaataaccttttgtggtcactgtaaaattaatatttggtagacagaatccatgtacctttgctaaggttagaatgaataatttattgtatttttaatttgaatgtttgtgctttttaaatgagccaagactagaggggaaactatcacctaaaatcagtttggaaaacaagacctaaaaagggaaggggatggggattgtggggagagagtgggcgaggtgcctttactacatgtgtgatctgaaaaccctgcttggttctgagctgcgtctattgaattggtaaagtaataccaatggctttttatcatttccttcttccctttaagtttcacttgaaattttaaaaatcatggttatttttatcgttgggatctttctgtcttctgggttccattttttaaatgtttaaaaatatgttgacatggtagttcagttcttaaccaatgacttggggatgatgcaaacaattactgtcgttgggatttagagtgtattagtcacgcatgtatggggaagtagtctcgggtatgctgttgtgaaattgaaactgtaaaagtagatggttgaaagtactggtatgttgctctgtatggtaagaactaattctgttacgtcatgtacataattactaatcacttttcttcccctttacagcacaaataaagtttgagttctaaactcattagaattgttgtattgctatgttacatttctcgacccctatcacattgccttcataacgactttggatgtatcttcatattgtagatttaggtctagatttgctagctccaagtaattaaggccatgtaggagagcatggtaaccacagatagaactggtattatcccaagtggtctgcagactgctgagtggggatgggatctgctctctgttgagagttggtaatcattggtttgaaatgtgatgaaaccactcaagccaatgaaggtgggtgtgtaggtggggagtactttgccataatattttaaaacattacctggttagagttctaagtggtacttatttttgtttggttaggggaaagcctgaataaaaacagaaatggacacataatatgcatattccatagtctttgggaggctggaatgtgcctgggatttgggtctaagtgtatgcgtaattcttacctcactaaagaatttgccttgtttttttccttttggtgagtgactaaaacgtctgggcttccctgtgtgcgtgctacagtaagcaagcagaggctgtgcaaaggtgtgagcaggatcacgtggaatctggaggatacatcttggcttgcaaactgcctctgtctcctgggtgggactgttctgtccttgcactgctgttctgtgttacctcttggggtgtaaggttttgcttacaggagacaaactttgggcgtagaatggaagccactgccagcctctgtgctgagaaggaaggtgcttgtttcaaagggagcagcaagggaggcttgttctactcacctgggcctgtttgcctgagaaggggagataagggctgaactgggactagccagggggaccaacacaaatggtgggggatcatgacctgaaggattctttccttcccatgagctgcagggctggttgccgtccttgcaactgtgtcttatttgcctgtgccgttatatcttggtgacccctccacgtgtacactactgacaaacgggtggagtgctggggagaagtcactgtgccgcccacctagtaaaccttctgtctgtgctcatggcatctccaagatggggcactgctgtgtgcagaatccagggtcctctttctgcttgcaactcctttccctggatgccccagaaacaatccaggcctcctttcctatcttacccctttgctttgctttttaccccagcacctctataaccgccttctcttcttttcagaactccttgtttctcatcctgttttttatgattacaaaactcttgcttccaccctggaagataactgctatagatgcctgtatgtaaatggtgctgtctccagcaactggcatgctgaagaagaattgattcacggggtataaatgttggggattggaagtggggatgaaatggcacttgttgatacaggagcagagaggtgaggccgactgctgaagacagctcgccaccctccttgcctccactccaatccaggggctggggccacattctttgccttcatttatcctcagatcaggtgagatcgacaggaggtgttgatggcagtgccagcaattattgctaatccgtttgcatccttatgcatagatctgaattcagactttgtgaatttccagaggtgtgggtaatataatagaattcagtgagtgggcatggctgatcttgtgcaaattaaaagttatggggcataagaatagcaaaagttgaacttcttttaaaaaggaaagtaccctgagagccagtattggttgaggctcttcagtatgcccaggttggcagcactgagaaccgcaggaacggcctgttgttacaaaaaggagattgactcagctgcccttggtgcatctgactgactatgactgctgagagattccaaggacccttaatgccagggctaacctctccatgtgcagtgagacctctggaggaagtgtcatcctctggctttgtgtggtactcattatggtgcagtgcgggcatgaaatgaagacacccaaataggcttacagatacgatatgttttaaatgttcgtatttaacaaaaacatactgacactgtttggaaatggcaacaggaagatagcaaaatgaatactaacattacgaaaagatgaacaggtacatgttccaaggcaggtggctgtgaacttcctctgagtgaaggcatcccctccagcacctttcagcctgctagttaggacgacccgccgccaccctccaggacctccagccctgcactgcctttcctctcttttaaataattcttcattgagttctaatatgtaaaaaaaaaaagtttactgtaaagtttgcaaataaggaaattttttttaaaagtcctcagtaatcttaccagtaacaattgttatgggcacatttgcttttggaagatttcttttgtatgcatgggataagtacatttttaaacaaaaatgggattatgccataaattctattttgtgactttaatatatagtgaacaccttttttaatgatgacaggatgttcccttgcatggctgtatcaatttaaacaatcttgtttcaatgggcatacagggtattttctagtttttttttcctcttagaaaataatacttgcgatgactttccttgtagctcagactttttcacgtctgttgttatctctttgggaatgctgaatacatacatttcgagaaggaaatgactgttaaactcttaagacttcaggttcatattgctaaactgcccagcagggagggattttttcaattagtgttctcactggtgaggcaaacctgatgccttcccctcttcctcagaaccggctttatcacattgaaaacctttgctcctccgacggatcgagtctgctttccctgtggatgtgagcattgctttgtctgctggtgactgaacatctctaccatgtgtcaattggccatttgtggtgtgtgtgtgtgtgcgtgtgtgtgtgtgtgtgtgtgtgtatgattttctaattcctagtcatttttctattgattgttttgcaaaagccatttacatcttaaggatattgataatcttttgttatatttgatgcaaatatttttttccagtttataggttgccttttaattttgtgtttcaggtagataaaagttaaacgattttcttaggttagtttatcactgtggtttctgaacttgttatgtgtagatcttttccaccccaagagtacataaatattaatccatactttcttatggaacttgtatggtttcgttttttacatttaaaccttcttccccgtggtgtgtgttgtggaatctgtgtttgtgtgaggaggggcatggtgctctcagaacccacctcctgtggccagagagccctgtcctgtgagggtggttatcacagtggcagggttcaattcagaagaccttgagggcaggctgatgtttcctgaatgggcccctggttgttgcttgtccctgactctccatttccccatctgagtggatttggacctaatagggcactggagctggttcgaatcctgactggactacttggcaactttatgtctgggagcaagttacttaacctccccaagcctgtgtctgtgaaatgcgggtaaatgaatgtagatgtttggcagcagctactccttgttgagctctcacagtgaactctcctgcctctgccctccttccccgcctcccctggtgcctagcgtcaggtctagccacttcctcctgggcccctctcccttttctgtggctggctgcctgcccgcctggcgctggacctttcatgtaacgggaatcagcatgtatattctggtctggtctgtttctacacttaattttgtttccagtagtatttccctgtaccggcagagttcacaaacacatttgaagaggctttttctcaggattcttaaccttcccaaaggaagtcccatggatgggtttctagaagtctataaatgctctgaaattgtatttttctgtggaaagcataactttcatctgcttgttcgtgctcaaaaaagatcatgaatgaatgattgcatgattttatgccattgtgcttatactaaaggatatgtagcccatctcttgagctgttaaactgttttgactactttaaatcgtgcagctgtgagcatctctgtaaatttagtgtacacatgtatcccctggagtggcattgcctcggcagtgagcacttatggttttataactctcttcacagactcaaatgactccagaaagctacacttcctgttgtgagtatatgatatccatttccctacatagccactaacatcaggtttttacaattttatttatttcttgctactttaagaaatttttgtggtgaaatacatataatagaagttgactatctgaatcatttttaagtatacattcagtagtgttaagtatgtcgccattgttgtacaaccaatctccagaactttttcatcttgcaaaacaaactctgtacccattaaataacattaaacattccattccctccagcctcagcaaccccattctactttctgtttctgtgagtttgactattccaagcacttcatatcagttaaatcatgaagtatttgtctgtctgtgactggcttatttctctgagcacagtgtcctcgagatgcgtctatgttgtagcatatgtcagaatttccttcctttttaaaagatccaaataatattcttattttatatcttttttttatccattcatccattagtggacacttgggttgcttttggctattgtaaataatggtgctatgtacaaatatctatattattgtatttacaagtataatgctgtaatgtacacacatctttttgagatcctaccttcagttcttttgagtatatagccagaagtggtattactaaatcttacgatatttctatttttaatttattgaggaaccactgtagtttttcatagcaactgcaccattttacgttctcaccaagagtgcacaagggttccgaggttcccacatcctccccaacacttgttattttctgctttttttagattgcagccatcatagtgggtgtgaggtgacatttcattgtggttttgatttgcatttccctaatgaggagtgatgctgagcatcttttcatatgcttactggtcatttgtatgttgtctttggaaaaatgtctattcaagtcctttgactattttaaaaattgggttattagagttatcgttgttgttgacttgtaggagtttctttctatattctggatattaatcccctatcagatatatgatttgcaaatatcttctcttattccataaggttactttttcactttgttgattgtgttctttgatgtatagaagtttttagttttgaaatagtctaatttatctgtttttacttttgtggtctgtgcttttggtgtcatatccaagaaatccttgccaaatccaacgttataaggtacttttaaggtattttagttgtcttagtctatatttctgtactcacctttctttatccactcatcagttgatgggcatgtaggttggttccatatctttgcaattctgaattgtgctgtgatcaggtgtctttttagtataatgatttactctcctttgcgtagatacccagtagtgggattgctggatcgaatggtttttataattttctattttaccacagtttctctctgcatttttcctctttgaccactaaccatgtgaaattctcatattgacctttataatgatcatgaactcttagtatcattgggaaggccacatttgccacttatgattgtaaaccttatcctccatttttcctgttattgttggtgcaaaaagcacctattataccaggactttaaaaatcagtctgataagtctttgataagtctaataataataactgataagtccattgaatttgcttctgattactttttctttagtagctaaacatgtatgtactcctatgattacaatgaacactcctctccatttaaattaattatttacattgatgaaatagcaaaatgttaatgactaaatactgtcttggttttttcgttccaggtcagtcaatattaacttcttataattttcttttttttctttatgtgtgtgtgtgtgtgtatttttttttttttaatttcaatggcttttggggtacaaatggcttttggtcatatagatgaattctacagtagtgaagtctgagattttactgcaccggtcacctgagtagtgtacattgtacccaatatgtggttttttataccttgcccccctcttaccctccccactttgagtctctagtgtccattatgtcactctgtatacctttttgtacccataagttagctctcacttataagtgagaacacacagtatttggttttccattcctgagttgcttcacttagaataatatcctccagctccatccaaaattgctgcaaaaaaaaaaaaaaccacaaacattattttgttcttttttattgctaagtcatattccatggtgtagagataccacattttatttatccactcactggttgatgggttggttccacatctttgcaattgtgacttgtactgccatcaagtgtctttctggtataatgacttcttttcctttgggtagatacccaggagtgggattgctagatcaaatggttcttaacattttctctctggatctatttctggaaattttaggctccagtttttgttgttgttgttaataaaatgcaatggaatgtaatgatcatcacttttcattatgctttaaaatctggtaaatggaggctagaacactcctgtaaggcaagaatattctctctgttggaactcaaatacacagaactgggtaaatctcaatcttaatctttgattcaggacacaacatggctctcttttacttgctttctttaattgttttttaataatgtggtaagcatttctgaatctcctatccaatacaaaaactaggacaatacagacagtaactcctatggttacaatgaacactcctctccacttaaattaattatttacactgatgaaattgaaatagcaaaattttaatgactaaatactgtctttgattttttgttccaggtctgtcaatattaacttcttataattttctttttttttctttatgtgtgtgtgtgtgtgtatatatatatatatttaatttcaatggcttttggggtacaaatggcttttggtcatatatatgagttctacagtagtgaagtctgagattttactacaccttccacttatgtggtcccacaccacccgcctcccctgccgcctcctgccaccccctaggccaaggtaataatcatcctgaatcctgggtttatctctcacttgctttcttttcatataattttgcaaaagaatctgatctaaatgtgtttttcagagtatatatttatattttagctgttcttagagaaaatttattattttgcatgtaatcttatggaacattctcatttaataccatggtaagattcagcccttgcccaggggatagttcatttagtttgtttactggatagagctcatcatgtgactatacctcagttagtttatcagttctcccatccatggtgactaggttgcctctcagcctctcaacaacactgtttctcagtgtccttgtagaagtgatatgtgggtgttttctccttacacagagttgaaaggtgacgacaacaacgttggcactaccaatcccccaccctccagaggggtaaccagtgttaccagtttgctgtgtttcctgctacacctcgccttattcacttccatttgtatctgaaaaacgtgttgcatggtttcttttctatagaagtggtaaaatgctattgtgtcctgtacattattgattactttttttcatttaacagtagggagatgcctgggagtacacagagaactgccctcattgttttcaacttctgcactgtatgtctgtgagtttagccattctgctgttaatggaaatttacagtattctaatcttttgatattacaaacagttctgtgcgatcatcgtcatacacaaccccttgtgcacaatgcatgagtgtttctcagggtaggtaccaagaagtgaaattcctgggtcatagggcgtgagtccgacatttttctccattctgccctgttgccctccagagtgggtgtccagctttgcatacctaagtatgagagtatctgttgttcatatcctctacgacgctccatatatgaaacttaagtttctgctagttgccatctttgatctatcatgtatgcagtgacctactaagactgtaattggtacagtagattcttgtcatctgtgtgtgaatttagcattcatgggcttaatgctgacaaggcccccagggtccaagacatataatcatgtataattttgtcaaggtataattttttaaattgcttttgtcatgtgtctgctggtgatgcccaacccagtgctctgcacccaggtcacactgtggctttgtcctctgcttatgcctgcattgcagcaactgtcctgaagagaccaaaattatgcagatttaggtaagtccatggctaatgttattatattatgtgctattgtaatggatggggctgtggagtgtatgaatttataaatcactggtcttgtaattaaaattcaaacactatagaaaaaggccatgtagaagataaaagttcctctataatcccggacccctaagataactactaatgacaacttcatttatattccttcagacattttctggctgtggatgtactaaaatgtatcctattattctctgccctaaaatggaatcatacaaggtgtactgttatttttatggctctataacatgtcatattgtacgtgttggtatggtcattttaaccatttttctagtgatggctttgaggttatttgcagtttcctagccatctcaaagtgtgctgcggggatctcttttgcatccctctgggtgcagagctgaggcacccagaggcagtgtccagaggaggcagcatctgtaggtgtcttcacctgctctggctcttggcacatctggttggtgacactgttttgtgagatgggttgaaagcacgtgctgccaaaatagaataatgttggtcctctcctcatgtgccgtggaactggggtaaaactgcgtagtggctgcagctgcctgtccataccggaatcgagtataacacggtgcctggcttagcacaaaacagtagtgggtcctgcaggccccagagtctaattcctggtattctttcccctacacagattaaataaaccaaaaacaaactattctaggaaagcgtctgtgacatttgtaaaaagtggtatttaatgatcttttattcacttgtctgtttagtttgttgaaatcttaagtggcatcctggtctgggaaggagtgctgtctgcgcctgccctccgctgggcacagcgtggctgcttcaggggctaagcacacactttctgtcttctaaagggccgccacatgccaggagctcaggtgtgagcccggctctggctcttacctcatagggtcactcataggggcacagggagcagaacattgtacacagcgaggcaccacccggcttggcatctgcctcggtggacttactacctctagaaggaaatacctgagttcctctggcctcagctcctagagtgactggtgtgctgtccctgttactcttctgtcaaggtgacaactgtgtgacccatcatctgtgtgtcaaagcaaggccctgcctgggcctctgctcctgtgctgaccccaaaggcaaatgctttgctagtttccttccagttaatttcacctatgaatagatgtgtgaaaactgttcaaagccatacctgcacatgtttgaacttcaaaccctgtgggtgattcagtggcatctttctctaacccccagcctcccttcccacagaggccaccgtcatggccagttgctgcagtttctttccagagaacctgtgtatgtgtaaagctgtacaggcgtgggtacaccacacagcctgtcttgcactgtggactgttgagttactagtacatctaggtaagcaccgcatatctgtattcatgtctgccttggtcttttcaacatctgtgtggtagccgtgtttgaattacccattccctttttggggaaccattaagttgtttcagcaatttttactgtagataaggctataccgcatatctgtgtacatgggtttttatgtacatgggcaagtatatctgtgagagaaaagtttcctcaggaggaattctgggcacagcatgtgtaaatttctaaatatgatggacacccccagcttccacctcaaggaggttggtcccattgacatttccccacaccttcacccaggctgtgcccttaaacttggttatttgtcaatgtgagaagtggaaaatagtatttaattgtagtttggatttgtatttctattgggttgtatacttactgattaataataagagctctttacatattaaggaaattaacccttttcaaatacattcctatttctcactaatctttaagttttattgtaatattttgctctttagtttatatatatatgtatatatatatatatgtatatatatatatatacatatatatatatatatatatatatatatatatatatatatatatatatatatatatatatatatatacatatatatatacatatatatatactaattttcttttatggttcctggattttgtgagtagtttgaaaaggctaatccagctgaagattttgttgttgttgttaaaccccatgttttctcctaactctttttatttttattttggaggactctatctagacttaattttagcataacaagtgacagggttagttagcctgttgtccttacaccattttctggctaatacagctattaactattgatctgtctattcacgtgccagttcctaatggttttacatagtgtaatctgcacttcaaaatagcgaagggaagccctacctcattattctacttttccagaattctcctggctattccaggctgcatgtttaccttaaccttccctgtgatgtcttcatgccgttgtcttcttatgcaagaataaggtacgtctttccatccactcacgtctatttaatttgactttgcattacacagaaagctggtcttggtctgtctacctcggcatctagttgtcctcactgccccctagccgaccccaccccatctgactgactaccccatcacagagtacttttatttacgttttgctctgcctaatggttacttgatactgtcacgccgacagtgtccagttcagtggtctttgcagttgaaatgctcccgtacacactgtcttgttaaaaatgccagtaagttcatacaaacccagcttgcacccaaggtcacattcagagagcgtagggctgggatgggttgttttccaagcttctgccactgtgtggctagctcttcccactgggaagttctgtgtacccggaatgtcggagtggagtcctgttctagtgtccagcacctgaccctgtgcccaacccctcaacagcctattcctgctgtccacagcctgctggaactttttacaaaatatgttgccatgctggaccctgggcactggacataagccccctggcagcctttttcatgtcacccaaaggggtaattgtcctactggtggtctgtaagatgagttagggtgacttgctaatagacattgtaaatcttaatatttatgtatgtattttattattaccggttttccatttatgatggtaatattgtttcttctaagaatatttatttttccttctaaatattgagataaaattcatgcttttgaaatgttctattcagtggcttttagtatatttgctatgttgtgcaaccatcgacactatccatttctagaactttttcgtcatcccaaacagacgctctgtattcataaaaaaataacttcctacctgtctctccccctagtctttggtaacctttgttatactggtaaactttgttgtgctctctgtctgtgtgaatttgcctattctaggggcctcatataagtgtaatcatacagtatttgtctttttgggtctgtctgatttcacttagcgggttttcagggttcattcatgttgcagcatataacagtactgcgttcctttttctggctgaataatattccactgtatggatagaccccattttgtttattcacacatcatttggacatttggattatttctggtttttggctattatgaacaatggtgctatgaacagttgcgtacaagtttttgtgtgaacatatgttttcaattctctcattatatacctaggagtagaattactgggtcatatggtaactgtatatttttgaggaactgccaaactattttcccacgtccatgcaccatttcacattcccaccagtaagtaagagggttccaatttctgcgcattcttgccaacactagttattatctgactttctggttataatcattctaatgagtgtgaagtagcctctggtgtcatttggatttgcatttctctgatgagtgatgctatcaagcacctttgctggtgctgttggccatatgtgtatgttccctggagaagtgtctgtgctgagccttggcccactttttaattaggcgtttgtctttttattactgagttgtaagagttctttatatattctggattctagacccttatcagatacatggtttgcaaatattttctcccattctgtgggttgtgttttcactttatcgataatgtccttagacatataataaatttgtattttaaaagtgacttgatttggctgtgcaaggtggctcacgcttgtaatcccagcactttgggagactgaggtgggtggatcatatgaggaggctaggagttcgaggtcagcctggccagcatagcgaaaacttgtctctactaaaaatacaaaaattagtcaggcatggtggtgcacgtctgtaataccagcttctcaggaggctgaggcacgaggatcacttgaacccaggaggaggaggttgcagtgagctgagatcatgccagggcaacagaatgagactttgtttaaaaaaaaaaaaaa

SEQ ID NO: 22676 - DNA, 1068 bp, Homo Sapiens
cgccggaggagttctgcgtctcggggtggtgactgggtccagaatggcttcggattcggggaaccaggggaccctctgcacgttggagttcgcggtgcagatgacctgtcagagctgtgtggacgcggtgcgcaaatccctgcaaggggtggcaggtgtccaggatgtggaggtgcacttggaggaccagatggtcttggtacacaccactctacccagccaggaggtgcaggctctcctggaaggcacggggcggcaggcggtactcaagggcatgggcagcggccagttgcagaatctgggggcagcagtggccatcctgggggggcctggcaccgtgcagggggtggtgcgcttcctacagctgacccctgagcgctgcctcatcgagggaactattgacggcctggagcctgggctgcatggactccacgtccatcagtacggggaccttacaaacaactgcaacagctgtgggaatcactttaaccctgatggagcatctcatgggggcccccaggactctgaccggcaccgcggagacctgggcaatgtccgtgctgatgctgacggccgcgccatcttcagaatggaggatgagcagctgaaggtgtgggatgtgattggccgcagcctgattattgatgagggagaagatgacctgggccggggaggccatcccttatccaagatcacagggaactccggggagaggttggcctgtggcatcattgcacgctccgctggccttttccagaaccccaagcagatctgctcttgcgatggcctcaccatctgggaggagcgaggccggcccatcgctggcaagggccgaaaggagtcagcgcagccccctgcccacctttgagcaggacctcaccttggctctgttgctgtcctccagggcgagcactttccacttccagagggggccagagggactttgcctgcccagtctttggagagctcagtacagggcaggagctgctgtggtgttcccttggcaaatgaaagttttattttcgtttgggaaaaaaaaaaaaaaaaaaaaaaaaaaaaaaaaaaaaa

SEQ ID NO: 22677 - DNA, 7642 bp, Homo Sapiens
cggaccctgcgcgcccccgtcccggctcccggccggctcgggggagaaggcgcccgaggggaggcgccggacagatcgcgtttcggaggcggcgcaggtgctgtaaactgcaaaccataatcctgtcttaatactgcaaacaaatcatagtggaactaaggggaacttaatttactgtttccaggttaactaaggtctcagctgtaaaccaaaagtgagaggagacattaagattttcattcttaccgggttgtcttcttcctgaagagcaatggagccgcttttacttggaagaggactaatcgtatatctaatgttcctcctgttaaaattctcaaaagcaattgaaataccatcttcagttcaacaggttccaacaatcataaaacagtcaaaagtccaagttgcctttcccttcgatgagtattttcaaattgaatgtgaagctaaaggaaatccagaaccaacattttcgtggactaaggatggcaaccctttttatttcactgaccatcggataattccatcgaacaattcaggaacattcaggatcccaaacgaggggcacatatctcactttcaagggaaataccgctgctttgcttcaaataaactgggaatcgctatgtcagaagaaatagaatttatagttccaagtgttccaaaattcccaaaagaaaaaattgaccctcttgaagtggaggagggagatccaattgtcctcccatgcaatcctcccaaaggcctcccacctttacacatttattggatgaatattgaattagaacacatcgaacaagatgaaagagtatacatgagccaaaagggagatctatacttcgcaaacgtggaagaaaaggacagtcgcaatgactactgttgctttgctgcatttccaagattaaggactattgtacagaaaatgccaatgaaactaacagttaacagtttaaagcatgctaatgactcaagttcatccacagaaattggttccaaggcaaattccatcaagcaaagaaaacccaaactgctgttgcctcccactgagagtggcagtgagtcttcaattaccatcctcaaaggggaaatcttgctgcttgagtgttttgctgaaggcttgccaactccacaggttgattggaacaaaattggtggtgacttaccaaaggggagagaagcaaaagaaaattatggcaagactttgaagatagagaatgtctcctaccaggacaaaggaaattatcgctgcacagccagcaatttcttgggaacagccactcacgattttcacgttatagtagaagagcctcctcgctggacaaagaagcctcagagtgctgtgtatagcaccggaagcaatggcatcttgttatgtgaggctgaaggagaacctcaacccacaatcaagtggagagtcaatggctccccagttgacaatcatccatttgctggtgatgttgtcttccccagggaaatcagttttaccaaccttcaaccaaatcatactgctgtgtaccagtgtgaagcctcaaatgtccatggaactatccttgccaatgccaatattgatgttgtggatgtccgtccattgatacaaaccaaagatggagaaaattacgctacagtggttgggtacagtgctttcttacattgcgagttctttgcttcacctgaggcagtcgtgtcctggcagaaggtggaagaagtgaaacccctggagggcaggcggtatcatatctatgaaaatggcacattgcagatcaacagaaccaccgaagaagatgctgggtcttactcatgttgggtagaaaatgctataggaaaaactgcagtcacagccaatttggatattagaaatgctacaaaacttagagtttctcctaagaatcctcgtatccccaaattgcatatgcttgaattacattgtgaaagcaaatgtgactcacatttgaaacacagtttgaagttgtcctggagtaaagatggagaagcctttgaaattaatggcacagaagatggcaggataattattgatggagctaatttgaccatatctaatgtaactttagaggaccaaggtatttactgctgttcagctcatactgctctagacagtgctgccgatataactcaagtaactgttcttgatgttccggatccaccagaaaaccttcacttgtctgaaagacagaacaggagtgttcggctgacctgggaagctggagctgaccacaacagcaatattagcgagtatattgttgaatttgaaggaaacaaagaagagcctggaaggtgggaggaactgaccagagtccaaggaaagaaaaccacagttatcttacctttggctccatttgtgagataccagttcagggtcatagccgtgaacgaagtagggagaagtcagcctagccagccgtcagaccatcatgaaacaccaccagcagctccagataggaatccacaaaacataagggttcaagcctctcaacccaaggaaatgattataaagtgggagcctttgaaatccatggagcagaatggaccaggcctagagtacagagtgacctggaagccacagggagccccagtggagtgggaagaagaaacagtcacaaaccacacattgcgggtgatgacgcctgctgtctatgccccttatgatgtcaaggtccaggctatcaatcaactaggatctgggcctgaccctcagtcagtgactctctattctggagaagactatcctgatacagctccagtgatccatggggtggacgttataaacagtacattagttaaagttacctggtcaacagttccaaaggacagagtacatggacgtctgaaaggctatcagataaattggtggaaaacaaaaagtctgttggatggaagaacacatcccaaagaagtgaacattctaagattttcaggacaaagaaactctggaatggttccttccttagatgcctttagtgaatttcatttaacagtcttagcctataactctaaaggagctggtcctgaaagtgagccttatatatttcaaacaccagaaggagtacctgaacagccaacttttctaaaggtcatcaaagttgataaagacactgccactttatcttggggactacctaagaaattaaatggaaacttaactggctatcttttgcaatatcagataataaatgacacctacgagattggagaattaaatgatattaacattacaactccatcaaagcccagctggcacctctcaaacctgaatgcaactaccaagtacaaattctacttgagggcttgcacttcacagggctgtggaaaaccgatcacggaggaaagctccaccttaggagaagggagtaaaggtatcgggaagatatcaggagtaaatcttactcaaaagactcacccagtagaggtatttgagccgggagctgaacatatagttcgcctaatgactaagaattggggcgataacgatagcatttttcaagatgtaattgagacaagagggagagaatatgctggtttatatgatgacatctccactcaaggctggtttattggactgatgtgtgcgattgctcttctcacactactattattaactgtttgctttgtgaagaggaatagaggtggaaagtactcagttaaagaaaaggaagatttgcatccagacccagaaattcagtcagtaaaagatgaaacctttggtgaatacagtgacagtgatgaaaagcctctcaaaggaagccttcggtcccttaatagggatatgcagcctactgaaagtgctgacagcttagtcgaatacggagagggagaccatggtctcttcagtgaagatggatcatttattggtgcctacgctggatctaaggagaagggatctgttgaaagcaatggaagttctacagcaacttttccccttcgggcataaacacaacatatgtaagcaacgctactggttcaccccaaccttccatatttatctgttcaaaggagcaagaactttcatataggaatagaaacatgctggccgaagatttcatccagaagtcaacatcctgcaattatgttgaaaagagtagtactttcttcaaaatataaaatgccaagcacttcaggcctatgttttgcttatattgttttcaggtgctcaaaatgcaaaacacaaaacaaatcctgcatttagatacacctcaactaaatccaaagtccccattcagtatattccatatttgcctgattttactattcggtgtgtttgcatagatgttgctacttggtgggtttttctccgtatgcacattggtatacagtctctgagaactggcttggtgactttgcttcactacaggttaaaagaccataagcaaactggttatttaaaatgtaaaaaggaatatgaaagtcttattaaaacacttcattgaaaatatacagtctaaatttattatttaaattttactagcaaaagtcttaggtgaacaatcaactagtatttgttgagctcctatttgcccagagatggtcatatttaaacagaagtatacgtttttcagtttcaacatgaatttttttatttctgtcagttatgacatccacgagcatcactttttgtgtctgtttttttttttttcttggactaaattcaactgcatggaagcggtggtcagaaggttgttttatacgagaacaggcagaaagtgcccattgttcaggattctaatagctacatctacttaatatcttcatttctaaattgactgcttttacctttttctcatgtttatataatggtatgcttgcatatatttcatgaatacattgtacatattatgttaatatttacacaatttaaaatatagatgtgttttattttgaagtgagaaaatgaacattaacaggcatgtttgtacagctagaatatattagtaagatactgtttttcgtcattccagagctacaactaataacacgaggttccaaagctgaagactttgtataaagtatttgggttttgttcttgtattgctttctttcaacagtttcaaaataaaatatcatacaaatattgagggaaatgttttcatatttttcaaaataggtttttattgttgaatgtacatctaccccagcccctcaaaagaaaaactgtttacatagaaattcctacacatacgtttgcgtatatgttattttaaacatctttgtggtgagaattttttccccgatattctccttctgtcaaagtcagaacaaattcagggaatttattttctggcagttgtgctccagtccttttaaaattgtacatgaacatgttttagaaacaatatggaggatgatgcatacatgtcggtcaagttcagcgctcgacattttatggaaagatttttttaaccttaccacgaaatacttaactactgtttaagtgaattgacttatttcactttagtttttgaactgtgattattggtatactgttatatcctcaacttggatttatggtaaccccttttagttcatggagaccaaaatttggggtatttataatagtcagcgcaggaatgcacatggaatatctacttgtccttttgaacctcacgagtcatccagaatgtatagacaggaaaagcatgtcttatttaaaactgtaatttatgggctcaggatctgaccgcagtcccgggagtaagcatttcaaagggggaaggcagtgtggtccctaccctgtgtgaatgtgaggatgtagacatccatcagtgcaactcgagctccatcctcctccgatttctaaggttccagttttctggagggacagtcatcatgttttgatttatctgggagaaaactgtggtgcacagcttgtgaggagggcaaggttgtgacgttcgagcttagttctggtgttattctgtctcctcttctttgtcatcagccaaaacgtggtttttaaagagagtcatgcaggttagaaataatgtcaaaaatatttaggaatttaataacctttaagtcagaaactaaaacaaatactgaaatattagctcttcctacacttcgtgttcccctttagctgcctgaaaatcaagattgctcctactcagatcttctgagtggctaaaacttatggatatgaaaaatgagattgaatgatgactatgctttgctatcattgttacctttcctcaatactatttggcaactactgggactcttcagcacaaaaggaatagatctatgattgaccctgattttaattgtgaaattatatgattcatatattttatgaatcagaataaccttcaaataaaataaatctaagtcggttaaaatggatttcatgattttccctcagaaaatgagtaacggagtcccacggcgtgcaatggtaattataaattggtgatgcttgtttgcaaattgcccactcgtgataagtcaacagccaatatttaaaactttgttcgttactggctttaccctaactttctctagtctactgtcaatatcattttaatgtaattgattgtatatagtctcaagaatggttggtgggcatgagttcctagagaactgtccaagggttgggaaaatccaaattctcttcctggctccagcactgattttgtacataaacattaggcaggttgcttaacctttttatttcaaactctctcaactctaaagtgctaataataatctcagttaccttatctttgtcacagggtgttcttttttatgaagaaaaatttgaaaatgataaaagctaagatgccttctaacttcataagcaaacctttaactaattatgtatctgaaagtcacccccacataccaactcaacttttttcctgtgaacacataaatatatttttatagaaaaacaaatctacataaaataaatctactgtttagtgagcagtatgacttgtacatgccattgaaaattattaatcagaagaaaattaagcagggtctttgctatacaaaagtgttttccactaattttgcatgcgtatttataagaaaaatgtgaatttggtggttttattctatcggtataaaggcatcgatattttagatgcacccgtgtttgtaaaaatgtagagcacaatggaattatgctggaagtctcaaataatatttttttcctattttatactcatggaagagataagctaaagaggggacaataatgagaaatgttggtgtgcttttctaagcatttaaaacataattgccaattgaaaccctaaatatgtttacataccattaagatatgattcatgtaacaatgttaaattaattataatgggattgggtttgttatctgtggtagtatatatcctagtgttcctatagtgaaataagtagggttcagccaaagctttctttgttttgtaccttaaattgttcgattacgtcatcaaaagagatgaaaggtatgtagaacaggttcacgtgattacctttttcttttggcttggattaatattcatagtagaactttataaaacgtgtttgtattgtaggtggtgtttgtattatgcttatgactatgtatggtttgaaaatattttcattatacatgaaattcaactttccaaataaaagttctacttcatgt

SEQ ID NO: 22678 - DNA, 1535 bp, Homo Sapiens
cctccgctcagtccgggagcgcacgtgggccgcggcgctccgacctccgctttcccaccgcccgcagctgaagcacatcccgcagcccggcgcggactccgatcgccgcagttgccctctggcgccatgtcgcagaacggagcgcccgggatgcaggaggagagcctgcagggctcctgggtagaactgcacttcagcaataatgggaacgggggcagcgttccagcctcggtttctatttataatggagacatggaaaaaatactgctggacgcacagcatgagtctggacggagtagctccaagagctctcactgtgacagcccacctcgctcgcagacaccacaagataccaacagggcttctgaaacagatacccatagcattggagagaaaaacagctcacagtctgaggaagatgatattgaaagaaggaaagaagttgaaagcatcttgaagaaaaactcagattggatatgggattggtcaagtcggccggaaaatattccccccaaggagttcctctttaaacacccgaagcgcacggccaccctcagcatgaggaacacgagcgtcatgaagaaagggggcatattctctgcagaatttctgaaagttttccttccatctctgctgctctctcatttgctggccatcggattggggatctatattggaaggcgtctgacaacctccaccagcaccttttgatgaagaactggagtctgacttggttcgttagtggattacttctgagcttgcaacatagctcactgaagagctgttagatcctggggtggccacgtcacttgtgtttatttgttctgtaaatgctgcgttcctaatttagtaaaataaaagaatagacactaaaatcatgttgatctataattacacctatgggatcaataagcatgtcagactgattaatgtctactgtgaaaatttggtagtaaattttcatttgatattagatataaatatctgaatataaataattttaatatactagtcatgatgtgtgttgtattttaaaaattatctgcaaccttaattcagctgaagtactttatatttcaaaagaatgaataacattgataataaaatcgctactttaaggggtttgtccaaaataaatattgtggccttatatatcacactattgtagaaagtattatttaatttaaatggatgcaggttgtctactaaagaaagattatatataactatgctaattgttcataatcaacagaaaccaagatagagctacaaactcagctgtacagttcgtacactaaactcttcttgcttttgcattataaggaattaagtctccgattattaggtgatcaccctggatgatcagttttctgctgaaggcacctactcagtatcttttcctctttatcactctgcattggtgaatttaatcctctcctttgtgttcaacttttgtgtgcttttaaaatcagctttattctaagcaaatctgtgtctactttaaaaaactggaaatggaaaaaaaaataaatctt

SEQ ID NO: 22679 - DNA, 1248 bp, Homo Sapiens
tacacgccagcgagctgctggccgctcaatggaccgatttccccggtttccatgaacccagcccagcccgggatgagaaactgcaaaatggcccgggtcgccagtgtgctggggctggtcatgctcagcgtcgccctgctgattttatcgctcatcagctacgtgtccctgaaaaaggagaacatcttcaccactcccaagtacgccagcccgggggcgccccgaatgtacatgttccacgcgggattccggtcacaatttgcgctgaagtttctagacccgtcattcgtgcccattacgaattctctcacccaggaactccaagagaaaccttctaagtggaaatttaatcggacagcgtttttacatcaaaggcaagaaattcttcagcatgtcgatgtaataaaaaatttttctttgaccaagaatagtgttcggattggacaactgatgcactatgattattccagccataaatatgttttctctattagcaataacttccggtcacttcttccagatgtgtcacccattatgaacaagcattataatatttgtgctgtggttggaaatagtgggatcctgacagggagccagtgtggacaagaaatagataaatcagattttgttttccgttgcaatttcgcccctacggaggctttccaaagagatgttggaagaaaaaccaatcttaccaccttcaaccccagcatcctggaaaaatattacaacaatctcttgactattcaggaccgtaacaactttttcctcagtttaaaaaagcttgacggggccattctttggatccctgcatttttcttccacacttcagcaactgtgaccaggacattagttgacttttttgttgaacacagaggtcagttaaaagtccaactggcttggccgggaaatataatgcaacatgtcaacaggtactggaaaaacaaacatttgtcacctaaacggctgagcacaggtattcttatgtacacccttgcatcagcaatatgtgaagagatccacttgtatggattttggccgtttggatttgaccccaacacaagggaagatcttccataccattactatgacaaaaaaggaaccaaatttaccaccaagtggcaggagtcccaccagctgcctgctgagtttcagctgctgtaccgaatgcatggggaagggctcaccaagctgactctgtcacactgtgcctaagaactccaaacggaaagcgccaaatggctgttt

SEQ ID NO: 22680 - DNA, 3013 bp, Homo Sapiens
caacgagttgtagccgcggagagcaggcgtcgatgctggcgcccaaagcctccagcctgagagtcgcctcactcgtgtgacgacagagtttcactcctgttacccaggctggaggacagtgatgtgatctcgggtcaccacaacctccgcctcccggattcaggcgattctcatgcctcagcctcccgagtagctcagattacaggcatgtgccaccacgcccggctaattttgtattttcagtcgagacggggtttccccatgttggtcaggctggtcttgaattcccgacctcaggtgatctgttcgcctcggcctcccaaagtgctgggattacaggcgtgaaccactgcacccggcgaggcattttttactgtctacagaaacttattgtaattcatttttcctcactccagtagtaagaattataccaaattgaaaagatatgaatgagtatcctaaaaaaagaaaaaggaagactctacacccttctcgttattcagattcctctggaataagcagaattgcagatggattcaatggaattttctctgatcattgttacagtgtctgttctatgagacagccagatttaaaatattttgacaacaaagatgatgattctgataccgagacgtcaaatgacttgccaaaatttgcagatggaatcaaggccagaaacagaaatcagaactacctggttcccagtcctgtacttagaattctagaccacactgccttttctacagaaaaatctgctgatattgtaatttgtgatgaagagtgtgactcacctgaatcagtcaaccagcaaacccaagaggagagtcctatagaagttcacactgctgaagatgttccaattgctgtagaagtgcatgcgatttctgaggattatgatatagagacagaaaacaattcctctgagagtctccaagaccaaactgatgaagaaccgccagctaaactttgtaaaattcttgacaagagccaagctttgaatgtgactgcccagcagaaatggcctttactgagagctaatagcagtggcctctataaatgtgaactttgtgagtttaacagcaaatatttttctgacttaaagcagcatatgatcctgaagcataaacgtactgattcaaatgtgtgtcgagtatgcaaggaaagtttctctaccaatatgcttctgatagaacatgccaaactgcatgaagaggatccctacatttgtaaatactgtgattataagacagtaatttttgagaacctcagccagcacattgcagacacccattttagtgatcacctctattggtgtgaacagtgtgatgtacagttctcctcaagcagtgaactctacctacatttccaggagcacagctgtgatgaacagtacttgtgtcagttctgtgaacatgaaactaatgatccagaagacttgcatagccatgtggtaaatgagcatgcatgtaaattaatagagttaagtgataagtataacaatggtgaacatggacaatatagcctcttaagcaaaattacctttgacaaatgtaaaaacttctttgtatgtcaagtatgtggttttcggagtagacttcacacaaatgttaacaggcatgttgctattgaacatacaaaaatttttcctcatgtttgtgatgactgtgggaaaggcttttcaagtatgctagaatattgcaagcatttaaattcacatttatctgaagggatttatttatgtcaatattgtgaatattcaacaggacaaattgaagatcttaaaattcatctagatttcaagcattcagctgacttgcctcataaatgtagtgactgcttgatgaggtttggaaatgaaagggaattaataagtcaccttccagtccatgagacaacttgattattctctttaacttacagaatgttagtttaaaataataaattcatcctttttttggagatgattaaatggatgattgtaaacacaacttatgaaatctgcctttaacaagtaacttttttaaattataaaattttattggcattgctccattttctgtatataaatatatctttaatgtggtattttcaattgcgtgatagtttgtagtttcaaccactcttggtgactgtcatcctgtttcttccatattctctgatttcatgaattgaaaagaaacaaatgtattgaagaagtgagctacagttttccttccttaaccatgggtgctagtaactttttaaaactcaagacaagattagttttttatgtgtgaagtcattaaattattacacgaccagaactaaaatgcaatatacagttaagtccacggatactcccattaatgagaaataacactaggaagccactattacaggaagaaaagatttggttttcatggcagtctgtttttttaaaaaaaaatttttgagccactatctattgttgaatattttaagatgggatgagggaggaactaataagggcttacacaataaaaaataactatatcataactcattcataacttgatgtttcattttctgttgaggaaccataaattcattcacagacttaatatttttttcttagagatggtctcgttctgttgtccaggatggagtgcagtggttgatcatagctcccgggccgtagtctcccaggctcgagcaatcctcccacttcaccctcctgcatagctaggactacaggcatgtggcaccatgcccgctaagtttttaaatttcttgtagagatgagatctcgctatgttgcccaggccagtctcaaactcctggactcaagcaatcctcccaccttggccttccaaatcactgggattataggcatgagccattatgcctgactcttgcccaaatttctgatgtcaaattgttcattgacagaaaacccactgaagtatttaaagttaggaagatctgggagataggggttgctggcatgaaaatgtataacttacaacatttattaataaaatgataaattagc

SEQ ID NO: 22681 - DNA, 2897 bp, Homo Sapiens
cgcagctcagcctgggcggcacagccagatgcgagatgcgtctctgctgatctgagtctgcctgcagcatggacctgggtcttccctgaagcatctccagggctggagggacgactgccatgcaccgagggctcatccatccacagagcagggcagtgggaggagacgccatgacccccatcctcacggtcctgatctgtctcgggctgagtctgggccccaggacccacgtgcaggcagggcacctccccaagcccaccctctgggctgaaccaggctctgtgatcacccaggggagtcctgtgaccctcaggtgtcaggggggccaggagacccaggagtaccgtctatatagagaaaagaaaacagcactctggattacacggatcccacaggagcttgtgaagaagggccagttccccatcccatccatcacctgggaacatgcagggcggtatcgctgttactatggtagcgacactgcaggccgctcagagagcagtgaccccctggagctggtggtgacaggagcctacatcaaacccaccctctcagcccagcccagccccgtggtgaactcaggagggaatgtaatcctccagtgtgactcacaggtggcatttgatggcttcagtctgtgtaaggaaggagaagatgaacacccacaatgcctgaactcccagccccatgcccgtgggtcgtcccgcgccatcttctccgtgggccccgtgagcccgagtcgcaggtggtggtacaggtgctatgcttatgactcgaactctccctatgagtggtctctacccagtgatctcctggagctcctggtcctaggtgtttctaagaagccatcactctcagtgcagccaggtcctatcgtggcccctgaggagaccctgactctgcagtgtggctctgatgctggctacaacagatttgttctgtataaggacggggaacgtgacttccttcagctcgctggcgcacagccccaggctgggctctcccaggccaacttcaccctgggccctgtgagccgctcctacgggggccagtacagatgctacggtgcacacaacctctcctccgagtggtcggcccccagtgaccccctggacatcctgatcgcaggacagttctatgacagagtctccctctcggtgcagccgggccccacggtggcctcaggagagaacgtgaccctgctgtgtcagtcacagggatggatgcaaactttccttctgaccaaggagggggcagctgatgacccatggcgtctaagatcaacgtaccaatctcaaaaataccaggctgaattccccatgggtcctgtgacctcagcccatgcggggacctacaggtgctacggctcacagagctccaaaccctacctgctgactcaccccagtgaccccctggagctcgtggtctcaggaccgtctgggggccccagctccccgacaacaggccccacctccacatctggccctgaggaccagcccctcacccccaccgggtcggatccccagagtggtctgggaaggcacctgggggttgtgatcggcatcttggtggccgtcatcctactgctcctcctcctcctcctcctcttcctcatcctccgacatcgacgtcagggcaaacactggacatcgacccagagaaaggctgatttccaacatcctgcaggggctgtggggccagagcccacagacagaggcctgcagtggaggtccagcccagctgccgatgcccaggaagaaaacctctatgctgccgtgaagcacacacagcctgaggatggggtggagatggacactcggcagagcccacacgatgaagacccccaggcagtgacgtatgccgaggtgaaacactccagacctaggagagaaatggcctctcctccttccccactgtctggggaattcctggacacaaaggacagacaggcggaagaggacaggcagatggacactgaggctgctgcatctgaagccccccaggatgtgacctacgcccagctgcacagcttgaccctcagacgggaggcaactgagcctcctccatcccaggaagggccctctccagctgtgcccagcatctacgccactctggccatccactagcccagggggggacgcagaccccacactccatggagtctggaatgcatgggagctgcccccccagtggacaccattggaccccacccagcctggatctaccccaggagactctgggaacttttaggggtcactcaattctgcagtataaataactaatgtctctacaattttgaaataaagcaacagacttctcaataatcaatgaagtagctgagaaaactaagtcagaaagtgcattaaactgaatcacaatgtaaatattacacatcaagcgatgaaactggaaaactacgagccactgcgcccggccacattcagttcttatcaaagaaataacccagacttaatcttgaatgatacgattatgcccaatattaagtaaaaaatataagaaaaggttatcttaaatagatcttaggcaaaataccagctgatgaaggcatctgatgccttcatctgttcagtcatctccaaaaacagtaaaaataaccactttttgttgggcaatatgaaatttttaaaggagtagaataccaaatgatagaaacagactgcctgaattgagaattttgattttttaaagtgtgtttctttctaaattgctgttccttaatttgattaatttaattcatgtattatgattaaatctgaggcagatgagcttacaagtattgaaataattactaattaatcacaaatgtgaagttatgcatgatgtaaaaaatacaaacattctaattaaaggctttgcaacacaaaaaaaaaaaaaaa

SEQ ID NO: 22682 - DNA, 2879 bp, Homo Sapiens
aaaaagctatttaggtgacactatagaaggtacgcctgcaggtaaccggtccggaattcccgggtcgacccacgcgtccgggggaagccactgctaccctcatcaggaagggcagacacaagaagcaccagttctatttgctgctacatcccggctctcgcaccgagggctcatccatccgcagagcagggcagtgggaggagacgccatgacccccatcgtcacagtcctgatctgtctcgggctgagtctgggccccaggacccgcgtgcagacagggaccatccccaagcccaccctgtgggctgagccagactctgtgatcacccaggggagtcccgtcaccctcagttgtcaggggagccttgaagcccaggagtaccgtctatatagggagaaaaaatcagcatcttggattacacggatacgaccagagcttgtgaagaacggccagttccacatcccatccatcacctgggaacacacagggcgatatggctgtcagtattacagccgcgctcggtggtctgagctcagtgaccccctggtgctggtgatgacaggagcctacccaaaacccaccctctcagcccagcccagccctgtggtgacctcaggaggaagggtgaccctccagtgtgagtcacaggtggcatttggcggcttcattctgtgtaaggaaggagaagatgaacacccacaatgcctgaactcccagccccatgcccgtgggtcgtcccgcgccatcttctccgtgggccccgtgagcccgaatcgcaggtggtcgcacaggtgctatggttatgacttgaactctccctatgtgtggtcttcacccagtgatctcctggagctcctggtcccaggtgtttctaagaagccatcactctcagtgcagccgggtcctgtcatggcccctggggaaagcctgaccctccagtgtgtctctgatgtcggctatgacagatttgttctgtacaaggagggggaacgtgaccttcgccagctccctggccggcagccccaggctgggctctcccaggccaacttcaccctgggccctgtgagccgctcctacgggggccagtacagatgctacggtgcacacaacctctcctctgagtgctcggcccccagcgaccccctggacatcctgatcacaggacagatccgtggcacacccttcatctcagtgcagccaggccccacagtggcctcaggagagaacgtgaccctgctgtgtcagtcatggcggcagttccacactttccttctgaccaaggcgggagcagctgatgccccactccgtctaagatcaatacacgaatatcctaagtaccaggctgaattccccatgagtcctgtgacctcagcccacgcggggacctacaggtgctacggctcactcaactccgacccctacctgctgtctcaccccagtgagcccctggagctcgtggtctcaggaccctccatgggttccagccccccacccaccggtcccatctccacacctggccctgaggaccagcccctcacccccactgggtcggatccccaaagtggtctgggaaggcacctgggggttgtgatcggcatcttggtggccgtcgtcctactgctcctcctcctcctcctcctcttcctcatcctccgacatcgacgtcagggcaaacactggacatcgacccagagaaaggctgatttccaacatcctgcaggggctgtggggccagagcccacagacagaggcctgcagtggaggtccagcccagctgccgacgcccaggaagaaaacctctatgctgccgtgaaggacacacagcctgaagatggggtggagatggacactcgggctgctgcatctgaagccccccaggatgtgacctacgcccagctgcacagcttgaccctcagacggaaggcaactgagcctcctccatcccaggaaagggaacctccagctgagcccagcatctacgccaccctggccatccactagcccggagggtacgcagactccacactcagtagaaggagactcaggactgctgaaggcacgggagctgcccccagtggacaccaatgaaccccagtcagcctggacccctaacaaagaccatgaggagatgctgggaactttgggactcacttgattctgcagtcgaaataactaatatccctacattttttaattaaagcaacagacttctcaataatcaatgagttaaccgagaaaactaaaatcagaagtaagaatgtgctttaaactgaatcacaatataaatattacacatcacacaatgaaattgaaaaagtacaaaccacaaatgaaaaaagtagaaacgaaaaaaaaaaactaggaaatgaatgacgttggctttcgtataaggaatttagaaaaagaataaccaattattccaaatgaaggtgtaagaaagggaataagaagaagaagagttgctcatgaggaaaaaccaaaacttgaaaattcaacaaagccaatgaagctcattcttgaaaatattaattacagtcataaatcctaactacattgagcaagagaaagaaagagcaggcacgcatttccatatgggagtgagccagcagacagcccagcagatcctacacacattttcacaaactaaccccagaacaggctgcaaacctataccaatatactagaaaatgcagattaaatggatgaaatattcaaaactggagtttacataatgaacgtaagagtaatcagagaatctgactcattttaaatgtgtgtgtatgtgtgtgtatatatatgtgtgtgtgtgtgtgtgtgtgtgtgtgtgaaaaacattgactgtaataaaaatgttcccatcgtaaaaaaaaaaaaaaaa

SEQ ID NO: 22683 - DNA, 4617 bp, Homo Sapiens
atccgataggaccaggtagccactgagcatgcctgtctggtgggcatagcctctgtgcctggtggggtccagccctgtatgtggacttcctgggggaccgcctgcatgctgggaaagtcctgcaactgtgggctctgggccggacccctcctccttggggagcgttgctgtggtctccgcagcctgttggtgtggtccgagaggggactggtgtgtggtggtagggacgcaggtgctcaggagggctcctcaggctgcctctctgcctgttactgctgctccctccctggtcctggggactcgctcaggcctggatgtgtggttttggacaccttggaaagaggttagctgtgagttttgctttgattgggctttgagctgctgagctagatctgtccaagcatgcttttgtggttttctcgagtctttggtcaccctgcgtagaattacctttacttttgccttcattttaggtaatcattaccaaatgaggaggaaaggacgatgtcatcgaggctctgcagcgaggcatccttcttccccatgcagtgttaaacactcccctacgcgagaaacgctgacctacgctcaagctcaaaggatggtagagatagaaattgaagggcgcttgcacaggatcagtatttttgatcccctggagatcatattggaagatgacctcactgctcaagagatgagtgagtgcaacagcaacaaggaaaacagcgagcggcctcctgtctgcttaagaactaagcgtcacaaaaacaacagagtcaaaaagaaaaacgaggccctccccagcgcccacggcacgccggcctcggccagtgccctcccggagcccaaggtgcgcatcgtggagtacagccctccgtccgcccccaggaggcctcctgtgtactacaagttcatcgagaagtcggccgaggaactggacaacgaggtggagtatgacatggacgaggaggactatgcctggctggagatcgtcaatgagaagcgcaagggcgactgcgtccccgccgtgtcgcagagcatgtttgagttcctgatggaccgcttcgagaaggagtcgcactgcgagaaccagaagcagggcgagcagcagtctctgatcgacgaggacgccgtgtgctgcatctgcatggacggggagtgtcagaacagcaacgtgatcctcttctgcgacatgtgcaacctggccgtgcaccaggagtgctacggggtgccctacatccccgagggccagtggctctgccgccactgcctgcagtcgcgggcccggcccgccgactgtgtgctgtgccccaacaagggtggtgccttcaaaaagacagatgacgaccgctggggtcacgtggtgtgtgccctgtggatcccagaggtcggctttgccaacacggtgttcatcgagcccatcgatggggtgaggaacatccctccagcccggtggaaactgacatgctacctctgtaagcagaagggcgtgggtgcctgcatccagtgccacaaagcaaactgctacacagcattccatgtgacgtgtgcccagaaggctggcctgtacatgaaaatggagcccgtgaaggaactgactggcggtggcaccaccttctccgtcagaaagaccgcttactgtgatgtccacacgcctccaggctgcacccggaggcctctgaatatttacggggatgtcgaaatgaaaaatggcgtctgtcgaaaagagagctcggttaaaacggtcaggtccacatccaaggtcaggaagaaggcaaaaaaggctaagaaagctctggctgagccctgcgcggtcctgccgaccgtgtgcgctccttatattcccccgcagaggttaaataggattgcgaatcaggtggccattcagcggaagaagcagtttgtggagcgagcccacagctactggctgctcaagcggctgtccaggaacggggcccccctgctgcggcggctgcagtccagcctgcagtctcagcgaagctcacagcagagagaaaatgatgaggagatgaaggctgccaaagagaagctgaagtactggcagcggctgcggcacgacctggagcgcgctcgcctgctgatcgagctgctgcgcaagcgggagaagctcaagcgtgagcaggtgaaggtggagcaggtcgccatggagctgcggctgaccccgctgacggtgctgctgcgctcagtgctggaccagctgcaagacaaggaccccgccaggatatttgcgcagcccgtgagtctgaaggaggtaccagattatttggatcacattaaacatcccatggactttgccacaatgaggaaacggttagaagctcaagggtataaaaacctccatgagtttgaggaggattttgatctcattatagataactgcatgaagtacaatgccagggacaccgtgttctatagagccgcggtgaggctgcgcgatcagggaggtgttgttctgaggcaggcccggcgcgaggtggacagcatcggcttggaagaggcctcggggatgcacctgcctgagcggcctgctgcggcaccgcggcggcctttctcctgggaagacgtggacaggttgctggaccccgccaacagagcccacctgggcctggaggagcagctgagagagctgctggacatgctcgacctcacctgcgctatgaagtccagcggctcccggagcaagcgggcaaagctgctcaaaaaggaaattgcccttctccgaaacaagctgagccagcagcacagccagcccctgcccacggggccaggcttggaaggcttcgaagaggacggagctgcgctggggccggaggcgggcgaggaagtccttccgaggttggagactcttctgcagccaaggaaaaggtcgcggagcacatgcggagactccgaggtggaggaggagtccccaggaaagcgcctggacgcaggtctcaccaacggctttgggggtgcgaggagcgagcaggagccgggcggcggcctggggaggaaggccacaccccgacgacgctgtgcctccgagtccagcatctcctccagcaacagcccgctctgcgactcgagctttaatgcgcccaaatgtgggcggggcaaaccggctcttgtgcgacggcacacgctggaggaccgcagtgagctgatctcctgcatcgagaatgggaactacgccaaggcggccaggatcgcagccgaagtcggccagagcagcatgtggatctccactgatgccgccgcctcggtgctggagcctctgaaggtggtgtgggccaagtgcagcggctacccctcctacccggcactgatcatcgaccccaagatgccccgtgtgcctggccaccacaacggcgtcaccatcccggccccacccctggacgtgctgaagattggggagcacatgcagaccaagtctgatgagaagctgttcctcgttctcttttttgataataagagaagttggcagtggcttcctaagtccaaaatggttccccttggtattgacgaaactatagacaagttaaagatgatggaagggaggaattccagcatccggaaggccgtgcggatcgcttttgaccgcgccatgaaccacctgagccgcgtccacggggagccgaccagcgacctcagtgacattgactgacggcccggccgccagcgcgggtcttgtccatagtgttgataagctgtacatgtttgtatattgttcaaaacttaacttattctgatttttagttatagctctttaattctttttccccggggaggggggaggttttatttccaagttttctaggaacccatctccgtctgggcgctgtgagtggggtgggcacgtccgggcagcccagtgcgtctgtcgcacgtccccaggccgtgctgctggcgtcactttctttgatatgtagctttttcttaaagacttttgaatgtttaataattttgtaaatcatgctctttacacagagtaccacttatttaataagacgggatgtaaatttacaatgacaaatgtgtattttaagaaagaaaatgacattattttgaatggtactttgtggaaagaggggagaataaagttatgctgtgtacatcacttgcagatcaccaaaaacactccgctgcccgtgaccgccggtgggtgtgtccccgctcccgtcgtcccgcccacctcaaaccccgcaggtgtgcctcccagcggattatttattgtagaaagtgtattcatttgctttataatgaaaaatacatttgcaaaggtatattgatatgcatttttatacaggcacataaaaattcaacttggcttgggagcagaatgcattgcattgtataaatgactctggcctgtgtgtactttgattttataacttgtaatcttttgtttacaatgaggggctttctgtaacttgttttaatttagaacactttggtagcaatagaaactttggatacatttttgtatggtacctgtgatgtatatagaattagtactttatttttatttttaagaggtaaagcattatgttggggaaagtagggtgggtttccaaatttgcattttttatattaaaaataaagtcaagaaaaaaaaaa

SEQ ID NO: 22684 - DNA, 1725 bp, Homo Sapiens
atggaggcgtctttggggattcagatggatgagccaatggctttttctccccagcgtgaccggtttcaggctgaaggctctttaaaaaaaaacgagcagaattttaaacttgcaggtgttaaaaaagatattgagaagctttatgaagctgtaccacagcttagtaatgtgtttaagattgaggacaaaattggagaaggcactttcagctctgtttatttggccacagcacagttacaagtaggacctgaagagaaaattgctgtaaaacacttgattccaacaagtcatcctataagaattgcagctgaacttcagtgcctaacagtggctggggggcaagataatgtcatgggagttaaatactgctttaggaagaatgatcatgtagttattgctatgccatatctggagcatgagtcgtttttggacattctgaattctctttcctttcaagaagtacgggaatatatgcttaatctgttcaaagctttgaaacgcattcatcagtttggtattgttcaccgtgatgttaagcccagcaattttttatataataggcgcctgaaaaagtatgccttggtagactttggtttggcccaaggaacccatgatacgaaaatagagcttcttaaatttgtccagtctgaagctcagcaggaaaggtgttcacaaaacaaatcccacataatcacaggaaacaagattccactgagtggcccagtacctaaggagctggatcagcagtccaccacaaaagcttctgttaaaagaccctacacaaatgcacaaattcagattaaacaaggaaaagacggaaaggagggatctgtaggcctttctgtccagcgctctgtttttggagaaagaaatttcaatatacacagctccatttcacatgagagccctgcagtgaaactcatgaagcagtcaaagactgtggatgtactgtctagaaagttagcaacaaaaaagaaggctatttctacgaaagttatgaatagtgctgtgatgaggaaaactgccagttcttgcccagctagcctgacctgtgactgctatgcaacagataaagtttgtagtatttgcctttcaaggcgtcagcaggttgcccctagggcaggtacaccaggattcagagcaccagaggtcttgacaaagtgccccaatcaaactacagcaattgacatgtggtctgcaggtgtcatatttctttctttgcttagtggacgatatccattttataaagcaagtgatgatttaactgctttggcccaaattatgacaattaggggatccagagaaactatccaagctgctaaaacttttgggaaatcaatattatgtagcaaagaagttccagcacaagacttgagaaaactctgtgagagactcaggggtatggattctagcactcccaagttaacaagtgatatacaggggcatgcttctcatcaaccagctatttcagagaagactgaccataaagcttcttgcctcgttcaaacacctccaggacaatactcagggaattcatttaaaaagggggatagtaatagctgtgagcattgttttgatgagtataataccaatttagaaggctggaatgaggtacctgatgaagcttatgacctgcttgataaacttctagatctaaatccagcttcaagaataacagcagaagaagctttgttgcatccattttttaaagatatgagcttgtga

SEQ ID NO: 22685 - DNA, 3858 bp, Homo Sapiens
ctactttattctgataaaacaggtctatgcagctaccaggacaatggaatctacgttgactttagcaacggaacaacctgttaagaagaacactcttaagaaatataaaatagcttgcattgttcttcttgctttgctggtgatcatgtcacttggattaggcctggggcttggactcaggaaactggaaaagcaaggcagctgcaggaagaagtgctttgatgcatcatttagaggactggagaactgccggtgtgatgtggcatgtaaagaccgaggtgattgctgctgggattttgaagacacctgtgtggaatcaactcgaatatggatgtgcaataaatttcgttgtggagagaccagattagaggccagcctttgctcttgttcagatgactgtttgcagaagaaagattgctgtgctgactataagagtgtttgccaaggagaaacctcatggctggaagaaaactgtgacacagcccagcagtctcagtgcccagaagggtttgacctgccaccagttatcttgttttctatggatggatttagagctgaatatttatacacatgggatactttaatgccaaatatcaataaactgaaaacatgtggaattcattcaaaatacatgagagctatgtatcctaccaaaaccttcccaaatcattacaccattgtcacgggcttgtatccagagtcacatggcatcattgacaataatatgtatgatgtaaatctcaacaagaatttttcactttcttcaaaggaacaaaataatccagcctggtggcatgggcaaccaatgtggctgacagcaatgtatcaaggtttaaaagccgctacctacttttggcccggatcagaagtggctataaatggctcctttccttccatatacatgccttacaacggaagtgtcccatttgaagagaggatttctacactgttaaaatggctggacctgcccaaagctgaaagacccaggttttataccatgtattttgaagaacctgattcctctggacatgcaggtggaccagtcagtgccagagtaattaaagccttacaggtagtagatcatgcttttgggatgttgatggaaggcctgaagcagcggaatttgcacaactgtgtcaatatcatccttctggctgaccatggaatggaccagacttattgtaacaagatggaatacatgactgattattttcccagaataaacttcttctacatgtacgaagggcctgccccccgcatccgagctcataatatacctcatgacttttttagttttaattctgaggaaattgttagaaacctcagttgccgaaaacctgatcagcatttcaagccctatttgactcctgatttgccaaagcgactgcactatgccaagaacgtcagaatcgacaaagttcatctctttgtggatcaacagtggctggctgttaggagtaaatcaaatacaaattgtggaggaggcaaccatggttataacaatgagtttaggagcatggaggctatctttctggcacatggacccagttttaaagagaagactgaagttgaaccatttgaaaatattgaagtctataacctaatgtgtgatcttctacgcattcaaccagcaccaaacaatggaacccatggtagtttaaaccatcttctgaaggtgcctttttatgagccatcccatgcagaggaggtgtcaaagttttctgtttgtggctttgctaatccattgcccacagagtctcttgactgtttctgccctcacctacaaaatagtactcagctggaacaagtgaatcagatgctaaatctcacccaagaagaaataacagcaacagtgaaagtaaatttgccatttgggaggcctagggtactgcagaagaacgtggaccactgtctcctttaccacagggaatatgtcagtggatttggaaaagctatgaggatgcccatgtggagttcatacacagtcccccagttgggagacacatcgcctctgcctcccactgtcccagactgtctgcgggctgatgtcagggttcctccttctgagagccaaaaatgttccttctatttagcagacaagaatatcacccacggcttcctctatcctcctgccagcaatagaacatcagatagccaatatgatgctttaattactagcaatttggtacctatgtatgaagaattcagaaaaatgtgggactacttccacagtgttcttcttataaaacatgccacagaaagaaatggagtaaatgtggttagtggaccaatatttgattataattatgatggccattttgatgctccagatgaaattaccaaacatttagccaacactgatgttcccatcccaacacactactttgtggtgctgaccagttgtaaaaacaagagccacacaccggaaaactgccctgggtggctggatgtcctaccctttatcatccctcaccgacctaccaacgtggagagctgtcctgaaggtaaaccagaagctctttgggttgaagaaagatttacagctcacattgcccgggtccgtgatgtagaacttctcactgggcttgacttctatcaggataaagtgcagcctgtctctgaaattttgcaactaaagacatatttaccaacatttgaaaccactatttaacttaataatgtctacttaatatataatttactgtataaagtaattttggcaaaatataagtgattttttctggagaattgtaaaataaagttttctatttttccttaaaaaaaaaaccggaattccgggcttgggaggctgaggcaggagactcgcttgaacccgggaggcagaggttgcagtgagccaagattgcgccattgcactccagagcctgggtgacagagcaagactacatctcaaaaaataaataaataaaataaaagtaacaataaaaataaaaagaacagcagagagaatgagcaaggagaaatgtcacaaactattgcaaaatactgttacactgggttggctctccaagaagatactggaatctcttcagccatttgcttttcagaagtagaaaccagcaaaccacctctaagcggagaacatacgattctttattaagtagctctggggaaggaaagaataaaagttgatagctccctgattgggaaaaaatgcacaattaataaagaatgaagatgaaagaaagcatgcttatgttgtaacacaaaaaaaattcacaaacgttggtggaaggaaaacagtatagaaaacattactttaactaaaagctggaaaaattttcagttgggatgcgactgacaaaaagaacgggatttccaggcataaagttggcgtgagctacagagggcaccatgtggctcagtggaagacccttcaagattcaaagttccatttgacagagcaaaggcacttcgcaaggagaagggtttaaattatgggtccaaaagccaagtggtaaagcgagcaatttgcagcataactgcttctcctagacagggctgagtgggcaaaatacgacagtacacacagtgactattagccactgccagaaacaggctgaacagccctgggagacaagggaaggcaggtggtgggagttgttcatggagagaaaggagagttttagaaccagcacatccactggagatgctgggccaccagacccctcccagtcaataaagtctggtgcctcatttgatctcagcctcatcatgaccctggagagaccctgataccatctgccagtccccgacagcttaggcactccttgccatcaacctgaccccccgagtggttctccaggctccctgccccacccattcaggccggaattc

SEQ ID NO: 22686 - DNA, 2677 bp, Homo Sapiens
tcgagcggccgcccgggcaggtagacagtaaggagccaggggaacagagagaattgtggggcagcaccgctccttgggtccccactccccatttctcattgcttggaaatccatgccaagatgcctgccttccttggtctaaagtgtctggggaaattgtgcagctctgagaaaagcaaagtcacctcatctgagagaaccagtgccaggggctcgaacagaaagagactgattgttgaggaccggagggtctctgggacctccttcaccgctcataggcgtgccactatcactcatttgctgtatctctgtcccaaggactactgcccacgtgggcgtgtatgtaacagcgttgatccttttgtggcccaccctcaggaccctcaccacccatcagagaagcctgtcattcactgccataaatgtggggagccttgcaagggtgaagtgcttcgggtccagaccaaacatttccacatcaagtgtttcacctgcaaagtgtgtggctgtgacctggcacaagggggcttcttcataaagaacggagagtatctctgcaccctggactaccagcggatgtacgggacacgctgccatggctgtggggagttcgtggagggcgaagtggtgactgctctgggcaagacctaccatcccaattgctttgcttgtactatctgcaagcgcccgtttccacccggagaccgagtcacattcaatgggagagactgcctttgtcaactctgtgcacagccgatgtcgtccagtccgaaagaaaccaccttctccagcaattgtgccggctgcggaagagatatcaagaacgggcaggcgctgctggcgctggataagcagtggcacttggggtgctttaaatgcaagtcctgcgggaaggtcctcaccggggagtacatcagcaaggatggtgctccgtactgtgaaaaggactaccagggactctttggggtgaaatgtgaggcgtgtcaccagtttatcacagggaaagtcctggaggcaggtgacaaacattaccaccccagctgtgcacgatgcagcagatgcaaccagatgttcacagaaggagaggaaatgtatcttcaaggctccaccgtttggcatcccgactgtaagcaatctacgaagaccgaggaaaagctgcggcctaccaggacatcctcggaaagtatttattctaggccaggctccagtattcctggctcaccaggtcatactatctatgcaaaagtagacaatgagatcctggattacaaggatttagcagccattccgaaggtcaaggcaatttatgacattgaacgtccagatcttattacctatgagcctttctacacttcgggctatgatgacaaacaggagagacagagccttggagagtctccgaggactttgtctcctactccatcagcagaagggtaccaggatgttcgggatcggatgatccatcggtccacgagccagggctccatcaactcccctgtgtacagccgccacagctacactccaaccacgtcccgctctccccagcatttccacagacctggcaatgagccgtccagcggccggaactcccctctcccttaccggccagacagcctccctctaactccaacttacgctcaggcccctaaacatttccatgttccagatcaaggaatcaacatttaccgaaagccacccatctacaaacagcatcgtgccttggcagcccagagcaagtcctcagaagatatcatcaagttttccaagttcccagcagcccaggcaccagaccccagcgagacaccaaagattgagacggaccactggcctggtcccccctcatttgctgtcgtaggacctgacatgaaacgcagatctagtggcagagaggaagatgatgaggaacttctgagacgtcggcagcttcaagaagagcaattaatgaagcttaactcaggcctgggacagttgatcttgaaagaagagatggagaaagagagccgggaaaggtcatctctgttagccagtcgctacgattctcccatcaactcagcttcacatattccatcatctaaaactgcatctctccctggctatggaagaaatgggcttcaccggcctgtttctaccgacttcgctcagtataacagctatggggatgtcagcgggggagtgcgagattaccagacactcccagatggccacatgcctgcaatgagaatggaccgaggagtgtctatgcccaacatgttggaaccaaagatatttccatatgaaatgctcatggtgaccaacagagggcgaaacaaaatcctcagagaggtggacagaaccaggctggagcgccacttagcccctgaagtgtttcgggaaatctttggaatgtccatacaggagtttgacaggttacctctttggagacgcaacgacatgaagaaaaaagcaaaactcttctaagtcccactcgtgtaatggcaattagagaaggactgacagtgcggtgccccataggatgtcatattgaggcccaaacttgattggagatttgcaaactaccgtcgctcagcaacaccaaaaagagaaagtctggttaaaacaccatgagtcaaatgtcgggccagccaacagtaacacttgccaagaagcatggcgtagaaatttctatgttccgaaaccc

SEQ ID NO: 22687 - DNA, 2286 bp, Homo Sapiens
aggccagagccatgggcgagaccaagatcatctaccacttggatgggcaggagacgccgtaccttgtgaagctgcccctgcccgccgagcgcgtcaccttggcggactttaagggcgttttgcagcgacccagctataagttcttcttcaagtctatggacgacgatttcggagtggtgaaggaggagatctcggatgacaatgccaagctaccatgcttcaatggccgggtggtgtcctggctggtgtcagctgagggctcacacccagacccagcccccttctgtgctgataacccatcggagctgccaccacctatggagcgcacgggaggcatcggggactcccgacccccatccttccaccctcatgctggtgggggcagccaggagaacctggacaatgacacagagacggactctttggtgtctgcccagcgagagcggccacgccggagggatggcccagagcatgcaacccggctaaatggaactgcgaagggggaacggcggcgagaaccagggggttatgatagctcatccacccttatgagcagtgagctggagaccaccagcttctttgactcagatgaggatgactccaccagcaggttcagcagctccacagaacagagcagtgcctcacgcctgatgagaagacacaagcggcggcggcggaagcagaaggtttctcggattgagcggtcctcgtccttcagcagcatcacggactccaccatgtcactcaacatcatcacggtcactctcaacatggaaaaatataacttcttgggcatctccattgtgggccaaagcaacgagcgtggtgacggcggcatctacattggctctatcatgaagggtggggccgtggctgctgatggacgcatcgagccaggagatatgttgttacaggtaaacgagatcaactttgagaacatgagtaatgacgatgcagtccgggtactgcgggagattgtgcacaaaccggggcccatcaccctgactgtagccaagtgctgggacccaagtccacgtggttgcttcacattgcccaggagcgagcccatccggcccattgaccctgcggcctgggtctcccacactgcagccatgaccggcaccttccctgcatacggcatgagcccctccctgagcaccatcacctccaccagctcctccatcaccagttccatccctgacacagagcgcctagacgacttccacttgtccatccacagtgacatggctgccatcgtaaaagccatggcctcccctgaatcagggttggaggtccgtgaccgcatgtggctcaagattaccatccctaatgctttcatcggctcagatgtggtggactggctgtaccacaatgtggaaggcttcacggaccggagggaggcccgcaagtatgccagcaacctgctgaaagctggcttcatccgccataccgtcaacaagatcaccttctccgagcagtgctactacatcttcggtgacctctgcggcaacatggccaacctgtctctccacgatcacgatggctccagtggcgcctctgaccaggacacactggcccctttgccgcacccgggggccgccccttggcccatggctttcccgtaccagtacccgccacgcccgcacccatacaacccgcacccgggcttgggggagctgggctacagctacggcgggggcagcgccagcagtcagcacagcgaaggcagtcggagcagtggctccaaccgtagcggcagcgatcggaggaaggagaaggacccgaaggccggggactccaagtccgggggcagcggcagcgaatcggaccacaccacacgcagcagcctgcgggggccgcgggagcgggcgcccagcgagcgctcagggccggcggccagcgagcacagccaccgcagccaccattccctggccagcagccttcgcagccaccacacacacccgagctacggtcctcccggagtgccccctctctacggcccccccatgctgatgatgcccccgccgcccgcggccatggggcccccaggagcccctccgggccgcgacctggcctcagtgcccccggaactgaccgccagcagacagtccttccgcatggccatgggaaaccccagtgagttctttgtggatgtgatgtgagcagggcccctcccccagctccattccgctcccaccccagccggctgcgttcctctctccatccgtccgtcttttttactttgtctggtacctgaaagggaaataaaaggaactaaatccaaaa

SEQ ID NO: 22688 - DNA, 5947 bp, Homo Sapiens
tctttagagcaaaaggtgaatcaaaggagagtcccagaaaacctgtgactgttgaagaaaattcatctgtgaatttttatattcaaggagtcagtatttatattcatcttttaaactgggaagatttatattttactttaaaacttcttgataataatttacaatgaatggacacagtgatgaagaaagtgttagaaacagtagtggagaatcaagccagtcggatgatgattctgggtcagcttcaggctctggatctggttcgagttctggaagcagtagtgatggaagcagtagccagtcaggtagcagtgactctgactccggatctgaatcaggcagtcagtcagagtctgagtcagacacttcccgagaaaacaaagttcaagcaaaaccaccgaaagttgatggagctgagttttggaaatctagtcctagtattctggccgttcagagatctgcaatcctcaagaagcagcaacagcagcagcagcaacaacaacatcaagcctcatctaatagcggatcagaagaggattcctctagcagtgaagattccgatgactcatcaagtgaggtcaaaaggaaaaagcataaagatgaagattggcaaatgtctgggtcaggatctccatctcagtctggttcagattcagaatctgaagaagagagagagaaaagcagttgtgatgaaacagaatctgattatgagccaaaaaacaaagtcaaaagcagaaaacctcaaaatagatctaagtcaaaaaatggaaagaagattcttggacaaaaaaagagacagattgattcatctgaggaggatgatgatgaagaagattatgataatgataaaagaagttctcgtcgccaagcaactgttaatgttagctataaggaggatgaagaaatgaaaacagattctgatgacctactggaagtctgtggagaggatgttcctcaacctgaggaagaggaatttgaaaccatagaaagatttatggattgtcggattgggagaaaaggagctactggtgctactacaaccatctatgcagttgaagcagatggtgacccaaatgcaggctttgaaaaaaacaaagaaccaggagagattcagtatttaattaaatggaaaggatggtcccatatccacaacacttgggagacagaagaaaccctcaagcagcagaatgttagaggaatgaaaaaattggataattataagaaaaaagatcaggaaacaaaaagatggttgaaaaatgcctctccagaagatgtggaatattataattgccagcaagaacttacagatgatctacataaacagtatcaaatagtgggacgtataattgctcattccaatcaaaagtcagcagctggttatcctgattattactgcaaatggcagggccttccatactcagagtgcagctgggaagatggagctctcatttccaaaaagtttcaagcatgcattgatgagtattttagcaggaaccaatcaaaaaccactccttttaaagattgcaaagtattaaaacaaaggccaaggtttgtagccctgaagaagcagccatcctatattggaggacatgagggcttagaattaagagattatcaactgaatggtttaaattggcttgctcattcttggtgcaaaggaaatagttgcatactcgctgatgaaatgggccttggaaaaacaatacagacgatctcatttctgaattatttgtttcatgaacatcaattatatggaccttttttattggtagtaccgctctccactcttacttcctggcaaagggaaattcagacttgggcttctcaaatgaatgctgtggtttatttaggtgacattaacagcagaaacatgataagaactcatgaatggacgcatcatcagaccaaacggttaaaatttaatatattgttaacaacttatgaaattttattaaaagataaggcattccttggaggtctaaattgggcatttataggtgttgatgaagcacaccgattaaagaatgatgactcccttctgtataaaactttaatagattttaaatccaatcatcgtctccttatcactggaactcctctacagaattccctcaaagagctctggtctttgctacatttcattatgccagaaaagttttcttcctgggaagattttgaagaagaacatggcaaagggagagaatatggttatgcaagccttcacaaggagcttgagccatttctgttacgccgagttaagaaagatgtggaaaaatctcttcctgccaaggttgagcagattttaagaatggaaatgagtgctttacagaaacaatattacaaatggattttaactaggaattacaaagccctcagcaaaggttccaagggcagtacctcaggctttttgaacattatgatggagctaaagaaatgttgtaaccattgctacctcattaaaccaccagataataatgaattctataataaacaggaggccttacaacacttaattcgtagtagcggaaaattgattcttcttgacaagctattaattcgcctaagagaacgaggcaatcgagttcttattttttcacaaatggtgcggatgttagatatacttgcagaatatttgaaatatcgtcaattcccctttcaaagattagatggatcaataaaaggagaactgaggaaacaagctctagatcattttaatgctgagggatcagaggatttttgctttttgctgtccacaagagctggaggtctagggattaatttagcctctgctgacactgttgttatatttgattccgattggaatccacagaatgatcttcaggcacaggctagagcccatcgaattggccaaaagaaacaggtgaatatttatcgtctagttacaaagggatcagttgaagaagatattcttgaaagggcgaaaaagaagatggttttagatcatcttgtaattcaaagaatggacacaactgggaagacagtactacatacaggttctgccccatcaagttctactcctttcaataaagaagagttatcagccattttaaagtttggtgctgaagaactttttaaggaacctgaaggagaagaacaagagccccaggaaatggatatagatgaaatcttgaagagagctgaaactcatgaaaatgaaccaggtcctttaactgtaggagatgaattgctttcccagttcaaggttgccaacttctcaaatatggatgaggatgacattgagttggaacctgaaagaaattcaaagaattgggaggaaattattccagaagatcaaagaagacgattagaagaagaagaaagacaaaaggaacttgaagaaatttatatgctcccaagaatgagaaattgtgcaaaacagattagtttcaatggaagtgaagggaggcgcagtagaagtaggagatactctggatctgatagtgattccatctcagaagggaaaaggccaaagaaacgtggaagaccacggactattcctcgggagaatattaaaggatttagtgatgcagaaattaggcggtttatcaagagctataagaaatttggtggtcctctggaaagattagatgcaattgctcgagatgctgagttagttgataagtcagaaacagaccttagacgactgggagaattggtacataatggttgcattaaagcattaaaggatagttcttcaggaacagaacgaacaggtggtagactcggaaaagtgaagggtccaacattccgaatatcaggagtacaggtgaatgccaaactagtcatctcccatgaagaagaattaatacctttgcacaaatccattccttctgatccagaagaaagaaagcagtatactatcccatgccacacaaaggcagctcattttgatatagactggggcaaagaagatgattccaatttgttaattggcatctatgaatatggatatggaagctgggaaatgattaaaatggatcctgacctcagtctaacacacaagattcttccagatgatcccgataaaaaaccacaagcaaaacagttgcagacccgtgcagactacctcatcaaattacttagtagagatcttgcaaaaaaagaagctctttctggtgcgggaagttcaaagaggagaaaagcaagagctaagaagaataaagcaatgaagtctataaaagtgaaagaggaaataaagagtgattcttctcctctgccttcagagaagtctgatgaagatgatgataaattgagtgaatccaagtctgatggtagggaaagatccaagaaatcttcagtgtcagatgctccagttcatatcacggcaagtggtgaaccagttcccatttctgaagaatctgaagagctggatcagaagacattcagcatttgtaaagaaagaatgaggcctgttaaagcagctttgaaacaacttgataggcctgagaaaggcctttcagaaagagaacaactagaacatactagacaatgtttaataaaaattggagaccatatcacagaatgtctaaaagagtatacaaatcctgaacaaattaagcaatggagaaaaaacctgtggatttttgtatctaagtttactgaatttgatgcaagaaaattacataaattatataagcatgctattaaaaaacggcaggagtctcagcaaaacagtgatcaaaacagcaacttgaatcctcacgtgattagaaatccagatgtggaaagattaaaagagaatacaaatcacgatgatagcagcagggacagttattcctctgatagacacttaactcagtaccatgatcatcataaagaccgacatcagggagattcttacaaaaaaagtgattccaggaaaagaccctattcttcttttagtaatggtaaagaccatcgtgattgggatcactacaagcaagacagcagatattacagtgacagagagaaacacagaaaactggatgatcacaggagtagagatcacaggtcaaatttggaaggaagtttaaaagatagatctcattctgatcatcgttctcactcagatcatcggttacattcagaccaccggtcaagttctgaatatacgcaccataaatcttccagggattataggtatcactcagactggcaaatggaccacagagcttccagcagtggccctaggtcaccactagatcagagatcttatggctccagatctccatttgaacattcagttgaacacaaaagtacaccggagcatacctggagtagtcggaaaacataacaaaaactgatacttcgtctttctggacttttcttttagccatatatcataaaccaacacagtaattgccttacatgacttgaaagatataaacagatcttctatcagtagcagtattgttacttctttccaggatgcaaggtctattatcccaacagaagagaaaatatttttatatttaaggattatgctgcactgtactacaaaattgtagtacttttttttgttttcttttttaaagaaatggaaaatgtttactattacagggacctcaacactgccctcccatacaggctggataaaactgtttttaagtcagtgattttagactgacctccatttaaattatgtttatatatgaactttactctgacctgtgatcatgtttcaggaaggaatgaaagagagttctttcttaataaagaaaaacactcaaggactttgttcatttccaaagctacttgtttacattgtacactgcgaccaccttgccgcttttcatcacaagcttgaatatttaaattctgtacttatatctgtaaaatagccaggaatttcctgtttgtgatctattatgcctttttacaaaaaaaatggctgtaaattattgtaaatattaaaggaactttccttacaaaaaaaaaaaaaaaaaaa

SEQ ID NO: 22689 - DNA, 7764 bp, Homo Sapiens
ccctgggatggaggatctgtctctctctctctctctcctttttttttttttggtggagatgaaggggtgggtctatggtacatcacctgagttgtggggtaaatgtagagagtgtcaatcaaaggcagagctctcagagctgggaaggaggctctagatggcggctgtgccttagagagagcgcgctctgctccctgcctttgcctcactttacgcaactttccctaactttcgggcagcctcagggggcccccgtagccccctgcctttcctagggacttactggggtcgattcgaacctttttttgggagaaaagcagcttttaggagctttcttttcgtgccttgttggaaagaagcagccgtactgagagcccaggtcgttgttttttccagcttagaagccatggcgcacctccatttttgtgcgctctcctaatgaggttttttttctttcggacctgttttagtattaattattgctttatttttttgaccagttaacatatttgagggttattttatttatttttcgttttttaacggaggattttgcctttatttttaattatttgggatctgatatttttctactagtagataggactcttggtttggacatactacatggatcagtaaatacctgggcacaggacttcaaagcaaacacagattccccctcccccttaatatttaagaattaaaagatgatgagaaataaggacaaaagccaagaggaggacagttcgctacacagcaatgcatcgagtcactcagcctctgaagaagcttcgggttcagactcaggcagtcagtcggaaagtgagcagggaagtgatccaggaagtggacatggcagcgagtcgaacagcagctctgaatcttctgagagtcagtcggaatctgagagcgaatcagcaggttccaaatcccagccagtcctcccagaagccaaagagaagccagcctctaagaaggaacggatagctgatgtgaagaagatgtgggaagaatatcctgatgtttatggggtcaggcggtcaaaccgaagcagacaagaaccatcgcgatttaatattaaggaagaggcaagtagcgggtctgagagtgggagcccaaaaagaagaggccagaggcagctgaaaaaacaagaaaaatggaaacaggaaccctcagaagatgaacaggaacaaggcaccagtgcagagagtgagccagaacaaaaaaaagtaaaagccagaagacctgtccccagaagaacagtgcccaaacctcgtgttaaaaagcagccgaagactcagcgtggaaagagaaaaaagcaagattcttctgatgaggatgatgatgatgacgaagctcccaaaaggcagactcgtcgaagagcggctaaaaacgttagttacaaagaagatgatgactttgagactgactcagatgatctcattgaaatgactggagaaggagttgatgaacagcaagataatagtgaaactattgaaaaggtcttagattcaagactgggaaagaaaggagccactggagcatctactactgtatatgcgattgaagctaatggcgaccctagtggtgactttgacactgaaaaggatgaaggtgaaatccagtacctcatcaagtggaagggttggtcttacatccacagcacatgggagagtgaagaatccttacagcaacagaaagtgaagggcctaaaaaaactagagaacttcaagaaaaaagaggacgaaatcaaacaatggttagggaaagtttctcctgaagatgtagaatatttcaattgccaacaggagctggcttcagagttgaataaacagtatcagatagtagaaagagtaatagctgtgaagacaagtaaatctacattgggtcaaacagattttccagctcatagtcggaagccggcaccctcaaatgagcccgaatatctatgtaaatggatgggactcccctattcagagtgtagctgggaagatgaagccctcattggaaagaaattccagaattgcattgacagcttccacagtaggaacaactcaaaaaccatcccaacaagagaatgcaaggccctgaagcagagaccacgatttgtagctttaaagaaacaacctgcatatttaggaggggagaatctggaacttcgagattatcagctagaaggtctaaactggctagctcattcctggtgcaaaaataatagtgtaatccttgctgatgaaatgggcctaggaaagaccatccagaccatatcattcctctcctacctgttccaccaacaccagctgtatggcccctttcttatagtcgtccctttatccaccctcacctcatggcagagagagtttgaaatctgggcaccagagattaacgtagtggtttacataggtgacctgatgagcagaaatacgatacgggaatatgaatggattcattcccaaaccaaaagattgaagttcaacgcacttataacaacatatgagatcctcttgaaagataagactgtgctgggcagtattaactgggcctttctgggagtggatgaagcccatcggttgaagaatgatgactctttattgtataaaactctgattgatttcaagtccaaccataggctcctgattacggggacccctcttcagaattccctcaaagagctctggtccttgctgcactttattatgccggagaagtttgaattttgggaagattttgaagaagaccatgggaaggggagagagaatggctaccagagtcttcataaggtgctagagcctttccttctccggagagtcaaaaaagatgtggagaaatcccttcctgctaaagtggaacagattctcagggtggagatgtcagcccttcagaaacagtattacaagtggattctgaccaggaattacaaggctcttgccaaaggaacaagaggcagcacatctggttttcttaatattgtgatggaactgaaaaaatgttgcaaccactgctatctgattaaaccccctgaagaaaatgaaagggaaaatggacaggagattcttctgtccctcataaggagcagtgggaagttgattttattagacaaactgttgacaagacttcgagaaagggggaatcgagtgcttatcttctctcagatggtgagaatgttggatatcctggctgaatacctaactattaaacactatcctttccagcgtctggatggttccatcaagggagaaatccgaaaacaggcactggaccacttcaatgcagatgggtctgaggacttctgtttcctgctctcgacaagggctggtggcctgggaatcaatttggcttcagcggacacagtcgtcatctttgactctgactggaacccccagaatgacttgcaggcacaagcccgagcgcatagaattggtcagaagaagcaggtaaatatttaccgcttagttacaaaggggactgtggaggaggagatcatagaacgggccaaaaagaagatggtattagatcatctggtgattcagcgcatggacaccactggccggacgatcctggaaaacaactcaggaaggtccaactcaaatccttttaataaagaagagctgacagctattttgaaatttggagcagaggatctcttcaaagaactggaaggggaggaatcagaacctcaggaaatggatatagatgaaattttgcggttggctgaaacgagagagaatgaagtgtcaacaagtgcaacagatgaacttctatcacagtttaaggttgccaactttgcaacaatggaagatgaagaagagctagaagagcgtcctcacaaggactgggatgagatcattccagaggaacaaaggaaaaaagtagaggaggaagagcggcagaaggagctagaagaaatttatatgctgcctcgaattcggagttccactaaaaaggctcagacaaatgacagtgactctgacactgagtctaagaggcaggcccagagatcctctgcttctgagagtgaaacggaagactctgatgatgacaagaagccaaagcgcagagggcgtccgaggagtgtgcggaaggacctcgtggagggatttactgatgcagagatccgaaggttcatcaaggcttataagaagtttggtctccctcttgaacggctggagtgcttagcacgtgatgctgagctggtagataagtcggtggcagatctgaagcgcctgggtgaactgatccacaacagctgtgtgtcagcaatgcaggaatatgaagagcagctgaaagaaaatgccagcgagggaaaaggaccagggaaaaggagaggtccaacaatcaagatatccggagttcaggttaatgtgaaatccattatccaacatgaagaggagtttgagatgctgcataaatctatccctgtggaccctgaagaaaaaaaaaaatactgcttaacctgtcgtgtcaaagctgcacattttgatgtagagtggggggtggaagatgattctcgcctgttgctggggatttatgaacatggctatggaaactgggagttaattaaaacagacccagagcttaaattaactgacaaaattctgccggtggagacagataaaaagcctcaggggaagcagctacagacccgagcggattacttgttgaagctgctcagaaagggtctggagaagaagggggctgtgacaggtggggaggaggccaaattaaagaagcggaagcctcgggtaaagaaggaaaacaaagtgcccaggctgaaagaggagcatggaattgagctttcatctcctaggcattcagataatccatcagaagagggagaagtgaaagatgatggcttggaaaaaagtccaatgaaaaaaaaacagaagaagaaagagaacaaggagaacaaggagaaacaaatgagttctaggaaagacaaagaaggggacaaggaaagaaagaagtcaaaagataagaaagagaagcctaaaagtggtgatgccaaatcttcgagtaaatcaaagcgatctcagggtcctgtccatattacagcaggaagtgaacctgtccccattggagaggatgaggatgatgatctggaccaggagacattcagcatatgtaaggagaggatgaggcccgtgaaaaaggcactgaaacagctcgacaaacctgacaaggggctcaacgtgcaagaacagctggaacacacccggaactgcctgctgaaaatcggagaccggatagccgagtgccttaaagcctactcagatcaggagcacatcaaactctggaggaggaacctatggatttttgtttccaagtttacagaatttgatgctcgaaaactgcataagttatacaagatggctcataagaaaaggtctcaagaagaagaggagcaaaagaagaaagacgacgtgactgggggtaagaaaccatttcgtccagaggcctcaggctccagccgggactctctgatatctcagtcccatacctcacacaaccttcaccctcagaagcctcatttgcctgcctcccatggcccacagatgcatggacacccaagagataactacaatcaccccaacaagagacacttcagtaatgcagatcgaggagactggcagagggaaagaaagttcaactatggtggtggcaacaacaatccaccatggggaagcgacaggcaccatcagtatgagcagcactggtacaaggaccaccattatggggaccggcgacatatggatgcccaccgttccggaagctatcgacccaacaacatgtccagaaagaggccttatgaccagtacagcagtgaccgagaccaccggggacacagagattattatgacaggtatgcaaaaggctgtgagacaccaggtgccaacctttgccaggagctgtttctagggagaaagtgacgtatacatgaatgtatttatctatcaaattactgaagatctcatcatgcatgtgtcagccacagcgaatcccatgtcttggttataggttttatgttttgttttctgggtcatagggagcacatttcacctgtgcaggaaaagagttttctgccgtcttttgaggaaatctagtgaagaggtcgccataaaatattagagtcaacaaccaaaattattaagctctgtgcgaggctgtcagccacactaggtatcagggatcccgagatgggtaccagcccacagtccttacctgccacgagcccataattgaagagtcaaagtcttctgaagctgcaccctctttacttcagtacaatgccaccagtagtacgatgagccaaagctttacattgtgagagtagcaagtccagggagagctaaagaggttttatctgtatttcctaatttcaaatcttggataatttaacctcatagcagctttggttttccctgggctgatgatgtgcgtcatttgcactgtaccttgaatttacagtgggaaaatttcatataaacgtgtcaaagtcgtgctttgtttttggaagatctggtaacagcagcccgcattagcagagagctgtagctgagtagctgccacctcgttgggagactgcccctcgctcccacccttctctattgtctggacccagtgggcatcttgccctgcgttcttctagtaggtctgtatttctatttgatgtcactttccttttgcctgaaggactttttctgctggtgataaactctttcagtgtttgtatatatgcctgaaaaagtattttgccttcatttttgaaagtagtttttgctgagtgtatacatttttggctttacagtttctttcagtgctttaaagatgtacctctgctatttacttgcattgttttgtgatgaaaaatctgtcatccttatctttgttcctctttacataatgttccttttaaaaaaaatcactgattatgatgtgccttggtgtatttttccttggtttcttgtgcttggaaatttttgaacttcttggatctgtgggtttattgtttccataaaatttggaaatttttacaatcttcttcaaatattttttctgatcccccactctctcttcttctttggagattctcattacacctatattagcttgcttgaagttgtctcacagctcacttgtattctgttgacttttaaaaaattatgctttctgtttcactgtggatagtttctattgctacctcttcaagttcactaatactttccttttcaatgtcaagactgctgtgaggcccatccagtgtactttgcattttatacattgtagttctaaaagttcggaaagttgtttttgggtctttttatatatgttctgtgtctaaccttttaaaacctggaacacagatataacaatggttttgatgtccttgtctgcgaatcttatcacttgggtcagtttcagttgatacctcctcactgtgggtcttgctcccctggtgctttctgtgcctagtaatttttgtcagatgccagatgtaacatttaccttgttgggtgctggatatttctgtattcctgtaagtattctggagctttgttatgagttgcaggttatttggaagcagtttcctttttcaggtcttgctgttaagattcgttaggtagaaccagagcagtgctcagtcaagggctaatgattgcccacccccaaggtaaagagcctcattgcactctacccaattgcgttagtctgttttgcaggaatacctgaggctgggtaatttatagagaaaagagttttatttgg

SEQ ID NO: 22690 - DNA, 3250 bp, Homo Sapiens
gcagcttgtggcggcgaagccatcggtgttcgctgatgtccagtctatggagtcagttggtaccggtggcggcgcggaggcagaaggcggtgtccgagtaggggcctctgccccaccaggatgttaccgggcttggccgccgccgcggcccacagatgtagctggtcctccctgtgccggctccgtctgcgatgcagggcggcggcctgtaatcccagcgaccgccaggagtggcagaatttagtgacatttggaagcttttcaaacgtggttccctgtagtcatccatatattggtaccctgagtcaagtaaagttgtactccacaaatgttcagaaagaaggacagggatcacaaacactcagagtggaaaaagtaccatcatttgaaacagcagaaggtataggcgcagaactcaaagctccacttaagcaagaacctctccaagtaagagttaaagcagtccttaagaaaagggagtatggatcaaagtacactcagaataatttcatcactggagtcagagcgataaatgagttctgcctcaaatccagtgatctagaacaacttcgaaaaatcagacgacgaagtccccatgaagatactgagtcttttactgtatacttgagatcagatgtggaagcaaaatctttggaagtttggggaagccctgaagctcttgccagagagaaaaaattgcgtaaggaagcagaaatagaatacagagaaaggctatttagaaaccaaaaaatattaagagaatacagagatttcttgggaaataccaagccacgctccagaacagcatcagtgttttttaagggaccaggaaaagtggtgatggttgcaatttgcatcaatggattaaactgcttctttaaatttcttgcctggatttataccggttcagcaagtatgttctcagaagctatacactcattatctgatacttgtaatcagggtttactagcattgggcatcagtaagtctgttcaaacaccagatccttctcatccgtacggattttcaaatatgcgctatatttcttcgctaattagtggtgttggtattttcatgatgggtgcaggactatcttggtaccatggagtcatgggattgcttcatcctcaaccaatagaatcccttctatgggcatattgtattttagcaggatcattagtatctgaaggagcaacacttcttgttgctgtaaatgaacttcgtaggaatgctcgggctaaaggaatgtcattttacaagtatgtaatggaaagtcgtgatcctagtacaaatgtgatattattggaggatactgctgcagtcttgggagttataatagcagccacttgcatgggccttacttctataacaggcaatccactgtatgacagcctaggttctttgggtgtgggcaccttattaggcatggtctcagcattcctcatctacactaacacagaagcactcttagggcggtccatccagccagaacaagtacaacggctcactgaactcctggagaatgacccatcagtaagggcaattcatgatgttaaagccacagatctgggattaggtaaagtaagatttaaggcagaagtagattttgatgggcgagttgttacaagatcatatttggaaaaacaagattttgaccaaatgttacaagaaattcaagaagtgaaaactcctgaagaactagagacctttatgcttaaacatggagaaaatattattgatactttaggagctgaagtagatagacttgagaaggaactgaaaaaacgaaatcctgaagttcgacatgtagatttggagatactgtgagtttgatggaatgaatcacctgggtggggaccttggaaacaagtttgtccgtccactctacaaagtttcctcctctcctacactgaaagactcagtgccatgcagaagccttttttttaagatgaaggaaatattttatgtaaagagcaactcagcaggacacagaactaaaactactacttacatctaacagacacactacaagttgaatcaatttgaaaatcatgtttttatgcttccatagggaacattttggttatttaaattgttcataatgtcccatatttcacctgttcagtgtatactgtactttgcaatcatctttccttttttcacattggtaaaaataagtggcatccataggatcatgatttttaatttgttgcctctgaagatttcactccatcaagatctgccaatcttcaatattctggctaaatcttggtatgtggtttttaaacagtcactccgtttcaaagtctgtctttccttatagaatgtggaaattatttctccataccttgtgattttgacctgagtgctaagagaatcactctccttacctagttatctacaaatgttcattccagaaatgtttagttactgaattgaatgaagacatctcagtacactcttttaggtcatagtagttgccattttgtaaaatttcttttttcttctttgcttttttccccttatttggtttaatttttctaatgttaggagatatagtcctagatatttccatgggccagtgtgatgacttttttttaaatgaggttcagtaccataatgtttatttactggaagataatgcatttataagcattttaaaattctgtaaagtgggttagaaatatttataattttacaggcaggacagcatttgacttttatttaaaaggcggcactacttatgtaaatctgagctgtgggatatttcttgctttaagagagagacagaatctctcactgaaactcatggtcatgattttgtataatatagttcatactgtgtctgtgagtatattcaattacaaatgggcatttagtatagttatattgactataacatgtaagtaaatagctttctactgaccctaagtcatcaaggtggaaaaaaaacatgcaattcagtaattgaaaatgtggtgaaaagctgcagctgtcatcatcaaaacaactcataacatactttaaaatgttcaggtagcagtgagcattgttcatatgagaatggcggctgggtgatctctttgctgaattaatgagttcttaacatgtggacccaactgcctgtgtgagatctgtgtcttaaaacttactggaatggaaatctatgaattattgcaaattgtaatgctggaaacaaaaaataaatccttggttaaagggaaaaaaaaaaaaaaaaaaaaaaaaaaaa

SEQ ID NO: 22691 - DNA, 3106 bp, Homo Sapiens
ggcggcggctcctgccctctcgctttccctctcgcgtctctggctgcaggtgaaaggaaagcaagccaggatggatatttacgacactcaaaccttgggggttgtggtctttggaggattcatggttgtttctgccattggcatcttcctggtgtcgactttctccatgaaggaaacgtcatatgaagaagccctagccaaccagcgcaaggagatggcgaaaactcaccaccagaaagtcgagaagaaaaagaaggagaaaacagtggagaagaaaggaaagaccaagaaaaaggaagagaaacctaatgggaagatacctgatcatgatccagcccccaatgtgactgtcctccttcgagaaccagtgcgggctcctgctgtggctgtggctccaaccccagtgcagccccccattatcgttgctcctgtcgccacagttccagccatgccccaggagaagctggcctcctcccccaaggacaaaaagaagaaggagaaaaaagtggcaaaagtggaaccagctgtcagctctgtagtgaattccatccaggttctcacttcgaaggctgccatcttggaaactgctcccaaggagggcagaaatacagatgtggcccagagcccagaggcaccaaagcaagaggctcctgccaagaagaagtctggttcaaagaaaaaagggcccccagatgccgacggccctctctacctcccctacaagacgctggtctccacggttgggagcatggtgttcaacgagggcgaggcccagcggctcatcgagatcctgtctgagaaggctggcatcattcaggacacctggcacaaggccactcagaagggtgaccctgtggcgattctgaaacgccagctggaagagaaggaaaaactgctggccacagaacaggaagatgcggctgtcgccaagagcaaactgagggagctcaacaaggagatggcagcagaaaaggccaaagcagcagccggggaggccaaagtgaaaaagcagctggtggcccgggagcaggagatcacggctgtgcaggcacgcatgcaggccagctaccgggagcacgtgaaggaggtgcagcagctgcagggcaagatccggactcttcaggagcagctggagaatggccccaacacgcagctggcccgcctgcagcaggagaactccatcctgcgggatgccttgaaccaggccacgagccaggtggagagcaagcagaacgcagagctggccaagcttcggcaggagctcagcaaggtcagcaaagagctggtggagaagtcagaggctgtgcggcaagatgagcagcagcggaaagctctggaagccaaggcagctgccttcgagaagcaggtcctgcagctgcaggcgtcccacagggagagtgaggaggccctgcagaagcgcctggacgaggtcagccgggagctgtgccacacgcagagcagccacgccagcctccgggcggatgccgagaaggcccaggagcaacagcagcagatggccgagctgcacagcaagttacagtcctccgaggcggaggtgcgcagcaaatgcgaggagctgagtggcctccacgggcagctccaggaggccagggcagagaactcccagctcacagagagaatccgttccattgaggccctgctggaggcgggccaggcgcgggatgcccaggacgtccaggccagccaggcggaggctgaccagcagcagactcgcctcaaggagctggagtcccaggtgtcgggtctggagaaggaggccatcgagctcagggaggccgtcgagcagcagaaagtgaagaacaatgacctccgggagaagaactggaaggccatggaggcactggccacggccgagcaggcctgcaaggagaagctgcactccctgacccaggccaaggaggaatcggagaagcagctctgtctgattgaggcgcagaccatggaggccctgctggctctgctcccagaactctctgtcttggcacaacagaattacaccgagtggctgcaggatctcaaagagaaaggccccacgctgctgaagcacccgccagctcccgcggagccctcctcggacctggcctccaagttgagggaggccgaggagacgcagagcacactgcaggccgagtgtgaccagtaccgcagcatcctggcggagacggagggcatgctcagagacctgcagaagagcgtggaggaggaggagcaggtgtggagggccaaggtgggcgccgcagaggaggagctccagaagtcccgggtcacagtgaagcatctcgaagagattgtagagaagctaaaaggagaacttgaaagttcggaccaggtgagggagcacacgtcgcatttggaggcagagctggaaaagcacatggcggccgccagcgccgagtgccagaactacgccaaggaggtggcagggctgaggcaacttctcctagaatctcaatctcagctcgatgccgccaagagcgaagcccagaaacagagcgatgagcttgccctggtcaggcagcagttgagtgaaatgaagagccacgtagaggatggtgacatagctggggccccagcttcctccccagaggcgcccccagccgagcaggaccccgttcagctgaagacgcagctggagtggacagaagccatcctggaggatgagcagacacagcggcagaagctcatggccgagtttgaggaggctcagacctcggcatgtcggttacaagaagaattggagaagctccgcacagccggccccctagagtcttcagaaacagaggaggcctcacagctgaaggagagactagaaaaagagaagaagttaacaagtgacctggggcgcgccgccacgagactgcaggagcttctgaagacgacccaggagcagctggcaagggagaaggacacggtgaagaagctgcaggaacagctggaaaaggcagaggacggcagcagctcaaaggagggcacctctgtctgagtttcctctttggaaaaagaagttactgttcaacttaccaaaatgccttacacattccttacaaataaaccaaccaacctacaaaaaaaaaaaaaaaaaaaa

SEQ ID NO: 22692 - DNA, 2040 bp, Homo Sapiens
attgtttaagccaagaaagctctttggtttgcttttattctaggcttaatgtttatgtaacctaaacattccccaatcttgtttcctacaggtagactgggtacaatgtgatggtggctgtgatgagtggtttcatcaagtttgtgtgggtgtatctccagaaatggctgaaaatgaagattacatctgtataaactgtgcaaagaagcaggggccagttagcccaggtccagcaccacctccttccttcataatgagctacaaactaccaatggaggatcttaaagagaccagttagcagatgcttggttagtttgggacatggggggacatggaccacattgagaccttagtcatcaagtagagtggtttatatccacttggaatgttgcttccaaagatgaatggccttcagagaaagtccccttagtgctggcttcctctttgcatggactctgtgggttacattctctatcaacatatctatgcagagggtgtcttctttggtacaacagccaatatttcatgtctcctttgagtgtggtttactgcattaaggccagatgcttaattgagctctagggtggctggttagtattaatacattggtgtgctaacagggcatataggatgtggcttttgtccagctgatagtagttagaggcttacaacttaggagcagcaccaactgaaggtgctaattgcttggatctccttcattgggatagttggagagggattggagtaccactttccttccactgttacctggtacttaatgccctaaagatacaactaggagtaacagggccaaagttatttctgttagacgtcaaggaatggtatcacagtctattgacctcagcgatttgtgcttgtttgtgctagaagaacatcccaaataggagaacctctcacaagctggggcaggtcaccttatctttgtaagatgaggatatcatctagatcagaaatctgactagattggattctgaggagaagaacctactacaaggcaaggagccgttttttggctttgaaaagtcttgctgtcttgggtctacattttagggaagagcaggtacatggatccaggcttctgccaaaaaaaaaaagagaagaagatgacgatgatgaccagtcgtactatcttactgagccacagtgatgcatgcttttcggggaaaacttcattcacaagtattccagacaccaggcttcaggcatggccatgagcaagaccagcaaataacagctttttgccttgcagccctgaccccaatgtctgctgtttccaacactggtgatttctaactacggcccacagcagatgctgttgaataacaccatggcttcatcagaggatgtggggttgtagtacctctgggtgatgaagttgttttagtaaatccatcagaggatgtggggttgtagtacctctgggtgatgaagttgttttagtaaatccatttttaaaaaaaaaaaaggacttgtttttacttttttctaaatgtctctgactactgactgttctatacatagattatttttccttttttaatatacatatatgaatatataaatatatatatttactgttaccagcagcatatgacagagtttcaacatcaaaaatccatttgggggcttgctttttcttttttgctttaaaaaaaaaaatcccattccttctttgtagtacaaggagttagcactccctcctccatcccagcctgaccagatcttccattttgcttttgttcatatagataattatatgtcctttgtgtgttgggacttgtccctgtctgttgggaaacttggtctcactctagtctgtgctggctcttttttcttttgtgtgtgaatgtttgaaactatggtgctgtgtcctcttccctcctgttgtgttctctgttcttcttaaggtattaggtaagctgtatgtaaactcttattagaaggggactaatttttttttaaaggacaaaaaaaaaaaatgactaaaaatagtgttttgtcaaaaaaaaaaaaaaaaaa

SEQ ID NO: 22693 - DNA, 1857 bp, Homo Sapiens
gttagacatatgaaatggttatgaacgcttttgtgctgctgatttttaatgctgtaaagttttcctgtgtttagcttgttgaaatgttttgcatctgtcaattaaggaaaaaaaaaatcactctatgttgccccactttagagccctgtgtgccaccctgtgttcctgtgattgcaatgtgagaccgaatgtaatatggaaaacctaccagtggggtgtggttgtgccctgagcacgtgtgtaaaggactggggaggcgtgtcttgaaaaagcaactgcagaaattccttatgatgattgtgtgcaagttagttaacatgaaccttcatttgtaaattttttaaaatttcttttataatatgctttccgcagtcctaactatgctgcgttttataatagctttttcccttctgttctgttcatgtagcacagataagcattgcacttggtaccatgctttacctcatttcaagaaaatatgcttaacagagaggaaaaaatgtggtttggccttgctgctgttttgatttatggaatttgaaaaagataattataatgcctgcaatgtgtcatatactcgcacaacttaaataggtcatttttgtctgtggcatttttactgtttgtgaaagtatgaaacagatttgttaactgaactcttaattatgtttttaaaatgtttgttatatttcttttcttttttcttttatattacgtgaagtgatgaaatttagaatgacctctaacactcctgtaattgtcttttaaaatactgatatttttatttgttaataatactttgccctcagaaagattctgataccctgccttgacaacatgaaacttgaggctgctttggttcatgaatccaggtgttcccccggcagtcggcttcttcagtcgctccctggaggcaggtgggcactgcagaggatcactggaatccagatcgagcgcagttcatgcacaaggccccgttgatttaaaatattggatcttgctctgttagggtgtctaatccctttacacaagattgaagccaccaaactgagaccttgatacctttttttaactgcatctgaaattatgttaagagtctttaacccatttgcattatctgcagaagagaaactcatgtcatgtttattacctatatggttgttttaattacatttgaataattatatttttccaaccactgattacttttcaggaatttaattatttccagataaatttctttattttatattgtacatgaaaagttttaaagatatgtttaagaccaagactattaaaatgatttttaaagttgttggagacgccaatagcaatatctaggaaatttgcattgagaccattgtattttccactagcagtgaaaatgatttttcacaactaacttgtaaatatattttaatcattacttctttttttctagtccatttttatttggacatcaaccacagacaatttaaattttatagatgcactaagaattcactgcagcagcaggttacatagcaaaaatgcaaaggtgaacaggaagtaaatttctggcttttctgctgtaaatagtgaaggaaaattactaaaatcaagtaaaactaatgcatattatttgattgacaataaaatatttaccatcacatgctgcagctgttttttaaggaacatgatgtcattcattcatacagtaatcatgctgcagaaatttgcagtctgcaccttatggatcacaattacctttagttgttttttttgtaataattgtagccaagtaaatctccaataaagttatcgtctgttcaaaaaaaaaaaaaaaaaaaaaaaaaaaaaaaaaaaaaaaaaaaaaaa

SEQ ID NO: 22694 - DNA, 2319 bp, Homo Sapiens
ccatgtgaccctctgactcaggttttgtgttcttcctagtggaaggagcctgggagaggccaggcctccccggactgctagcctgcttttcctggggtccctggagccggaggaagaaccaggatgttgctgcctgcagaagctcagctcaggaagacttccaggaacctgaggaggagctgccactaacagccatatttcccaatggagactgtgatgaccttggaagggggtcaaaagcctgtgatggagtcgtacacactcctgctgagcccaccggagactcaagatgaaggctggacccttgcgctgtccctggctctaacctacagactggggcctggctccgtcttactggcccccaggtctccatggagactgcagaaacccccgcctgctggaggcctgccacactcacagttaccagctagacagtggggcttactaagacaagcaggacctaaaacagtgtctcccctgggaacctactccccacccacagttaccagctagacagtggggcttactaagacaagcaggacctaaaacagtgtctcccctgggaacctactccccacccagcatttgctaagtctgatcacagggaggttattttgtctctctgtctcggtttctctgagccactgagacagatggctgtccgctttgaggctctgcagagctgtggcaccccatggtgtgtctgcagtgttctgggcacatgcatgggcacccatcgttgagagtgcagctgggaagaactctgaaccagaagtcatcagagctgaggcatggccttgaacatgtcactcagtctctggggcttctgtttcacaaatgcatgagggggccaccagcccagtggctttaaaccaggggcaggttgtccctccaggcagcattggaaatgtgtgtgtgttgagggggtcacagtgactgtgggggcacccctggcatctagtgggcatcccacaatgtgcagaacagtctctgacagcaaagaattggtccattcaatgccaattgtagtacctttgagacattctggctgagccaatgccttctccctgtcagagtcccccagagcagagagggtcaggcttccctggaccttggctcccagagcaagccaaaataaagactacactgttgccttgggggcttgtcgggccagggccaagacggtctgcgtgctgcagggccaggacagaaatagccacacatgccggtgagaacaaagagcctctttctttctcatgttgacatcgactttctgtgccaagtcctttgggtataaggatgctagggaattcctataggcaccaaacagaaggaaagctaggggcttggactactgggtataggacttgctctagctctcaggtcctagcccaagctcaatgcaaacacagcccctccgggctctctgtttctgtgaggttctggaatcccttcctctgtgtccgtgagtctgacagaatcgatgatgttcccttagagctgggaaatccatgtgtttattcacggagggaactcaccattacctcccttgtcttctttgcctgccttggagaaatccagagtcttcggaatggcaaaggcagctcctggatttccctggaggggaggcactagctgagggaagtagctcccttcattcatgatgcacagtttacgcagcagacacacaactgcgcctactatttgctcggtgccctgcaagtgctgcctaactttgatttgttatttcagctctctccaggatagtgccaaatggtgcaatgggaaacctgttttgctggggggctctagatcactggctccagaactcccggctgccagggtagcccctacccccagccccttgctcctggacagcagtgggtctcacctttagcctctgcccccagttctggtctgacccaacagaggggctctatgatattaagaaggggcccttcctgctctgtgcctcaacctattctccataatagggagtctaatcctattccttccctgcctgatgaggatggtgtgaggatgaggaggacggcatctcatttggggctttttggcagtgggcctcattttaatcctgcagggctgcctgccagtggatctatccagctgcttccttgtagccaagaatgagttcaatgaattgtgattcactgattttattgattttgttttaaaacagggagactggtatttttgaagctgctatcattttctatttctttattaatttctttgtaatcatcttattaaagttttcttatttagtgggaaaaaaaaaacaaaaaaaaaaaaaaaaaa

SEQ ID NO: 22695 - DNA, 6411 bp, Homo Sapiens
gaattcgcggccggcggcgtcgagttggcaggagtaacccacggaactgaggaaagtcattagagctgagaaagaagtggcccaatctggacggtgggaattcgtgggaatgagcagaaggccctccgtaggtgactgtgtcactagaggcgggcccctggtaaaattccaggccaggcctctgcgtttctaggcagaacctggagtcggccttgcctgagaacccagctttgtgttatcgtatcctgtctcgcgaaggcaggcgttcaaggatatttggtcggatcgcccggcggcgctaaacgttttcttttttccgagcggaccgggtcgttctctaaactcgccgcgatgtcgtcctggcttgggggcctcggctccggattgggccagtctctgggtcaagtcgggggcagcctggcttccctcactggccagatatcaaactttacaaaggatatgctgatggagggcacggaggaagtggaagcagaattacctgattctaggacaaaggaaattgaagccattcatgcaatcttgagatcagagaatgaaaggcttaagaaactttgtactgatctagaagagaaacatgaagcatcagagattcaaataaagcagcaatctacaagttaccgaaatcaacttcaacaaaaagaggtagaaatcagccatcttaaagccagacagattgccctccaggatcagttcctgaaactgcagtcagctgctcagtcagtaccttcaggagctggtgtaccagcaaccactgcatcatcttcattcgcttatgggattagtcatcatccttcagctttccatgacgatgacatggactttggtgatataatttcatcccaacaagaaataaaccgactctcaaatgaagtttcaagacttgagtctgaagttggccattggaggcatattgctcagacttccaaagcacaaggaacagataactctgatcaaagtgaaatatgtaaactacaaaatatcattaaggaactaaaacagaaccgaagtcaggaaattgatgaccatcaacatgaaatgtcagtactgcagaatgcacaccaacagaaattgacagaaataagtcgacgacatcgagaagaattaagtgactatgaagaacgaattgaagaacttgaaaatctgttacaacaaggtggctctggagttatagaaactgatctctctaaaatctatgagatgcaaaaaactattcaagttctacaaatagaaaaagtggagtctaccaaaaaaatggaacaacttgaggataaaataaaagatataaataaaaaattatcttctgcagaaaatgacagagatattttgaggagagaacaagaacagctaaatgtggaaaagagacaaataatggaagaatgtgaaaacttgaaattggaatgtagtaaattgcagccttctgctgtgaagcaaagtgatactatgacagaaaaggaaagaattcttgcccagagtggatcagtggaagaagtgttcagactacgacaagcactgtctgatgccgaaaatgaaataatgagattgagtagtttaaaccaggataacagtcttgctgaagacaatctgaaacttaaaatgcgtatcgaagttttagaaaaagagaagtcattactgagtcaagaaaaggaagaacttcagatgtcacttttaaaattgaacaatgaatatgaagtaattaaaagtacagctacaagagacataagtttggattcagaattacatgacttaagacttaatttggaggcaaaggaacaagaactcaatcagagtattagtgaaaaggaaacactgatagccgagatagaagaattggacagacagaatcaagaagctacaaagcacatgattttgataaaagctcagctatcaaaacaacaaaatgaaggagatagcatcatcagtaaactgaaacaagatctaaatgatgaaaaaaagagagttcatcaacttgaagatgataaaatggacattactaaagagttagatgtacagtttgttttgctaattcaaagtgaagtggccctaaatgatttacatttaaccaagcagaaacttgaggacaaagtagaaaatttagtagatcagctaaataaatcacaagaaagtaatgtaagcatccagaaggagaatttagaacttaaggagcatattagacaaaatgaggaggagctttctagaataaggaatgagttaatgcagtctctaaatcaagactctaatagtaattttaaggataccttacttaaagaaagagaagctgaagttagaaacttaaagcaaaatctttcagaattagaacagctcaatgaaaatttaaagaaagttgcttttgatgtcaaaatggaaaatgaaaagttagttttagcatgtgaagatgtgaggcatcagttagaagaatgtcttgctggtaacaatcagctttctctggaaaaaaacactattgtggagactctaaaaatggaaaaaggagagatagaggcagaattgtgttgggctaaaaagaggctgttggaagaagcaaacaagtatgagaaaaccattgaagaactgtcaaatgcacgtaatttgaatacctctgccttacagctggaacatgagcatttaattaaactcaatcaaaagaaagacatggaaatagcagaactcaaaaagaatattgaacaaatggatactgaccataaagaaactaaggacgttttgtcatctagtttagaagagcagaagcagttgacacaacttataaacaagaaagaaatttttattgaaaagcttaaagaaagaagttcaaagctgcaggaggaattggataaatattctcaggccttaagaaaaaatgaaattttaagacagaccatagaggaaaaagaccgaagtcttggatccatgaaagaggaaaataatcatctgcaagaagaattggaacgactcagggaagagcagagtcgaaccgcacctgtggctgaccctaaaacccttgatagtgttactgaactagcatctgaggtatctcaactgaacacgatcaaggaacatcttgaagaggaaattaaacatcatcaaaagataattgaagatcaaaaccagagtaagatgcaactacttcagtctttacaagagcaaaagaaggaaatggatgagtttagataccagcatgagcaaatgaacgccacacacacccagctctttttagagaaggatgaggaaattaagagtttgcaaaaaacaattgaacaaatcaaaacccagttgcatgaagaaagacaggacattcaaacagataactctgatatttttcaagaaacaaaagttcagagccttaatatagaaaatggaagtgaaaagcatgatttatctaaagctgaaacggaaagattagtgaaaggaataaaagagcgagaactggagattaaacttctaaatgaaaagaatatatctttaactaaacagattgatcagttgtccaaagatgaagttggtaaactaactcagattattcagcagaaagatttggagatacaagctcttcatgctagaatttcttcaacttcccatactcaagatgttgtttaccttcaacagcaactgcaggcttatgctatggaaagagaaaaggtatttgctgttttgaatgagaagactagggaaaatagccatctaaaaacagaatatcacaaaatgatggatattgttgctgccaaggaagcagctcttatcaaactgcaagatgaaaataaaaaattgtccactagatttgaaagtagtggccaagatatgtttagagaaactattcagaatttatcacgtatcattcgagaaaaagacatcgaaatagatgcactaagtcagaaatgtcagactttattggcagttttacaaacatccagcactggtaatgaggctggaggtgttaatagtaatcaatttgaggagcttctacaggaacgtgacaagttaaaacagcaagtaaagaaaatggaagagtggaagcagcaggtgatgaccacagtacaaaatatgcaacacgagtcagcccagcttcaggaagagcttcaccaacttcaagcacaggttttggttgacagtgataataattctaaattacaagtggactatactggcctgatccaaagttatgagcagaatgaaaccaaactcaaaaattttgggcaggaattagcacaagttcagcacagcattgggcagctttgcaataccaaggatcttcttttaggaaaacttgatattatttcaccccagctgtcttctgcatcattgcttactccccagtctgcagagtgtcttagagcaagtaagtctgaagtattgagtgaatcttctgaattgcttcagcaagagttagaagagctaagaaaatcactacaggaaaaagatgcaacaattagaactctccaggaaaataaccacagattgtctgattcgattgctgccacctcagagctagaaagaaaagaacacgaacaaaccgattcagaaatcaagcagctaaaggagaaacaagatgttttgcaaaagttacttaaggaaaaagacctcttaatcaaagccaaaagtgatcaactactttcttccaatgaaaatttcactaacaaagtaaatgaaaacgaacttttgaggcaggcagtaacaaacctgaaggagagaatattaattctagagatggacattggcaaactaaaaggagaaaatgaaaaaatagtggaaacatacaggggaaaggaaacagaatatcaagcgttacaagagactaacatgaagttttctatgatgctgcgagaaaaagagtttgagtgccactcaatgaaggagaaggctcttgcttttgaacagctattgaaagagaaagaacagggcaagactggagagttaaatcagcttttaaatgcagttaaatcaatgcaggagaagacagttgtgtttcaacaggagagagaccaagtcatgttggccctgaaacaaaaacaaatggaaaatactgccctacagaatgaggttcaacgtttacgtgacaaagaatttcgttcaaaccaagagctagagagattgcgtaatcatcttttagaatcagaagattcttatacccgtgaagctttggctgcagaagatagagaggctaaactaagaaagaaagtcacagtattggaggaaaagctagtttcatcctctaatgcaatggaaaatgcaagccatcaagccagtgtgcaggtagagtcattgcaagaacagttgaatgtagtttccaagcaaagggatgaaactgcgctgcgcttctgtctctcaggaaccgtaaagcagtatcgtctgtcactggccaacctgcagatggtactagagcatttccaacaagaggaaaaagctatgtattctgctgaactcgaaaagcaaaaacagcttatagctgaatggaagaaaaacgcagaaaatctggaaggaaaagtgatatcattacaggaatgtttggatgaagcaaatgctgcattggattcagcatcaagacttacagaacagttagatgtaaaagaagaacaaattgaagaacttaaaagacaaaatgagctccgacaagaaatgctggatgatgtacaaaagaaattgatgagcttagcaaacagctcagaaggaaaagtagacaaagtcctaatgagaaacctcttcattggtcatttccacacaccgaaaaatcagcgtcatgaagtgttacggttaatggggagcatcctgggcgtcagaagggaggagatggagcagttgtttcatgacgaccagggcggtgttaccaggtggatgactgggtggcttggaggaggatcaaaaagtgttcccaacacacctttgagaccaaatcagcaatctgtggttaatagttctttttcagaactttttgttaaatttctagaaacagaatctcatccatccattccaccaccaaagctttctgttcatgatatgaaacctctggattcaccaggaagaagaaaaagagatacaaatgcaccagaaagttttaaagatacagcagaatccaggtctggtagaagaacagatgtaaatccgtttttggctcctcgctcggcagctgtacctcttattaacccagctggacttggacctggtgggcccgggcatcttcttctgaaacccatctcagatgttttgcccacatttacacctttgccagcgttacctgacaacagtgctggggttgtgctgaaagaccttttaaagcaatagatgattctcaagccagagacaatctagcactttaaagaaaccatgaacactatatgtatgtactttatcacaaagtggcctttggggagaaagtcatgtatttggttcggcggccgcgaattc

SEQ ID NO: 22696 - DNA, 1120 bp, Homo Sapiens
ggtttcagaaactgcctacttaatttgaaaagaacaatggtaggaaaggctagatcttccaattttaccttatccgaaaagcttgatttgctaaagcttgtgaagccatatgtgaaaattctcgaagaacacactaataaacattcagtaatagtagaaaagaatagatgttgggatatcatagcagttaactataatgcaattggagtagaccgccctcctcgaacagcacagggcctacgcaccctttataaaaggctcaaagaatatgccaaacaggagctattgcagcaaaaagagacccaatcagattttaaaagcaatatttctgagccaaccaagaaagttatggagatgattccccagatttccagtttttgcctggtaagagacaggaaccacatacaaagtgcaaacttggatgaggaggcacaggctggtaccagttcactacaggtaatgttggatcaccatcctgttgctattacagtggaggtgaagcaagaagaagacattaaaccacctcctccactggttttaaattctcaacagagtgatactttagagcaaagagaagaacatgaattagtacatgttatggaaagatccttgtcgccttcactttcctctgttgatatgagaatgacatcgtctccatcttctattccaaggagagatgatttttttcggcatgagagtggtgaacactttaggtcactattagggtatgatcctcagatcctgcaaatgttgaaagaggagcatcagataattttagaaaatcaaaaaaattttggattgtatgttcaggagaagagggatggattgaaaagaaggcagcagctagaggaagagctactaagagcaaaaattgaagtggagaagctgaaagcaattcgcttacggcatgatctacctgaatataacagtctctaagtttttttttcaatcttgcaatttgataattttgattttggccaaattactttaatttgggaatatcctgaaacagaatacacgttcttgaaaaatgttgttaatctctattatggaaaaactttttagatataattttctaattattttcttttgagatattaaaatttactggttggttggc

SEQ ID NO: 22697 - DNA, 7383 bp, Homo Sapiens
ttctgcttatcatggttaccaacaaaatgactgctgcctttagaaaccctagtgggaaacaggtggcgacagacaaagttgcagaaaagctgagctctactctctcatgggtgaagaacacagtatcgcatacagtcagtcagatggccagtcaggtggcaagtccatctacttcattacataccacatcctcatctaccacactatcaacaccagccctttcaccatcttccccatcacagttgagtccagacgtcttagaactcctggctaaactggaagaacagaatatattgttagaaacggatagtaagtctttaagatctgtaaatgggtcaagaagaaacagtggctcttctcttgtgtcgagttcatcagcctctagcaacctcagtcaccttgaagaagattcttggattctttggggaagaattgttaatgaatgggaagatgtacgcaaaaagaaggaaaagcaagttaaggaacttgttcataaagggataccccatcactttagagcaatagtttggcaacttttatgcagtgcacaaagtatgccaattaaggatcagtattcagaactcctgaaaatgacctcgccttgtgaaaaattgatccgaagggacattgctagaacttaccctgaacacaacttttttaaggaaaaagatagccttggacaggaggttttatttaatgtaatgaaggcttactctttagtagatcgtgaggttggttactgtcaaggaagtgcttttatagttggattgttgcttatgcagatgccagaagaagaagctttctgtgtatttgttaaattaatgcaagattatagacttcgtgaactttttaaaccaagtatggcagaattgggcctttgtatgtaccagtttgaatgtatgatacaggagcatcttccagagctctttgtacattttcaatctcagagttttcatacctcaatgtatgcatcatcctggtttctgactatctttcttacaacttttccactaccagttgcaacaaggatatttgatatctttatgtctgagggtttagaaatagtgtttcgtgtaggattagcacttcttcagatgaatcaggcagaactgatgcaacttgacatggaagggatgttacagcactttcaaaaggtcattccacatcagtttgatggtgtcccagacaagctaatccaagcagcttaccaagtccaatacaattcaaaaaaaatgaaaaagcttgaaaaggaatacactacaataaaaacgaaagaaatggaagagcaagttgaaattaaaaggttacgcacagaaaatagacttttaaaacagcgcatcgagacattagaaaaacataaatgcagttccaactacaacgaagattttgtgctacagctagagaaggaattggtccaagcccgactgagtgaagctgagtctcagtgtgcattaaaagagatgcaggataaagtcttggatatagagaagaggaataactcccttcctgatgagaataatattgcaaggcttcaggaagaactcattgctgtgaaacttagagaagcagaagccattatgggtttgaaagaacttagacagcaagtcaaggatttagaggaacactggcagcgccacttagctcgtactactgggagatggaaagacccacccaagaaaaatgctatgaatgagttacaggatgaactgatgaccattcgacttagagaagctgaaacacaagcagaaataagagaaataaaacaaaggatgatggaaatggaaacacagaaccagatcaatagtaaccatcttcgaagagcagaacaagaggtgattagcctacaggagaaagtgcagtatctttctgcacagaacaaaggactccttactcaattaagtgaagcaaagcgtaaacaagcagagattgaatgcaagaataaggaagaagtgatggctgtgaggcttcgggaagcagatagcatagctgctgtggctgaactacgacaacacattgctgagcttgaaatccagaaagaagaaggaaagcttcaaggacagcttaacaagtctgattctaaccagtatattggggaactgaaagatcagatagcagagctgaatcatgagctcaggtgcctaaaaggccagaagggcttctcaggccaacctccttttgatggaatccacattgtcaaccatttaataggagatgatgaatcattccattcctccgatgaagattttatagataattccttacaggaaactggtgttggttttcctttgcacggaaaatctggctcgatgtctttggaccccgcagtggcagatggtagtgagagcgaaacagaagacagtgtgctggagaccagagagagcaaccaagtggttcaaaaggagcggcccccgagaagaagagagtcgtattcaaccactgtctgaccatcactgtgacctagactatggatttatttaagggatcagttatcatatgattagggctttttggaaataatttgttttcatatgtatatatatatatatatatatatattttacagtcttatctgcctttttatctttgccaaatctttaccactgatttaccattgccataaagtagactggtatatggttaatgtgtaaaacaaggttctaacagtattactgaatattaatgtttcttgtttagaaaatgcaactatatctatatgtgggaaccatttctgaagttcaaaactatggaaaattgaattttcttcaaacaaaactgctcttgtgcaatattttatgctcagtgagcaaattgtgtatttatgtttatcaatttgttccccaggtggctgtctacaaacatttgaccaaaacatacatttgaattaccttgggtttttttttattggtgttttttttttaagacagagattcagtttgtcacccaggctggagtgctgtggtgtgattttagttcactgcaacttccgcttcccaggttcaagcaattttcctgcttcagcttcccgagtacctgggactatatgtgcgcaccaccacgcctggctaattttttgtatttttagtagagatggggtttcaccatgttggctgggctggtctcgaactcctaacctcaagtgatccacccgcctcagcctcccaaagtgctgggattacaggtgtgagccactgcacccagcctaccttgtctgtttgtgtctgggaggttttttttttctatttttattttttcatgaaaattattggtgggccactgaaagtccccacacacaaagcctttattctatataattttataaacacaaattcatgattatctgttttgagagttttaagttttgttttaatgtttaacttttatgtgcatatgatgctttccatgtgttggttactagagtagtaggttaactacagacatactgttttgtttgtacatatttataaatctgtaccacctaacattgaacatcattttatatgaagaacatacatgttgcaaaatgactgctttcagcatctaacaggacttctgtaaataataggttaaaagttaaaaataaaacactaatgttttaagagctttagtattttgcttagcattcaatactagcagattcataactgatgcctgttcaaaaacactgttggtggaatcttttatttcatgtgtatgtaactactaaatttttcatgactgaagaggttatagcacatattagttagtgctaatattctactgaatataatttaagcaatgggctaaggtccaagaaacatagcaattatatctacaaataatctattaacatgatcttcagaatctctagtttttgttctatagataaagccataagaatcctttcctaccagtttttcctatatcatttagatattatttcctagaaaacaggatgcctgtcactgataagttagagaaaacacccaaattatacttgcactatggaaagacgacatggatttgttgtctgggtactttctactctcatttttgttagcctatgaaaaaaaaaaacattttgttaacctatggaaaaagccttggaagagaaaagtagaattcagtatgtatggaggcacagttttgcacagtatgttgcatgcggcaaaaaaaaaaatatgaaatagagtagaagagataaaagtagttttctgtcaaaaactaggagttaagccttcaggtacgttgtggactaggctttccagcaaggtttttgtagctatttgcttgcctgagaaatgaaattgaaaacatacccctgcgtgtctgtccttaacaccaggctaaattctggtggttaaataacttacctgtggttacaagctagtaagtagcagagccaagattttttttaatatagagacaggtgtctcactgtgttgtccaggctggtcttgaactcctggcctcaagtggtcctcctgcctcagcctcccaaagtgtggggattacaggtgcgagctactgctcccagcaagagccaagattttaacctagatctccctaacaccaaagcttttgaaagggtttcagctgaagaatttcttcaattcttctgttttgtttttatttttgttttttgagatgaagtctcactgcactcaggctggagtgcagtggtacgatcttggctcactgcaacttccacttcccgggttcaagcgattctcctgcctcagctcccaagtagctgggactacaggtgcacgccaccacaactggctaatttttgtatttttagtagagatggggtttcgctatgttggccaggctgatctcaaacttctgacctcaggtgatccacccactttgacctcccaaagtgctgggattactagacgtaagccaccacacctggcaattccctgcttttttgacaacataatttaaatgaatttgatttaaatgtttcctgaatatatatacagatagatagatgagtatcaacacttacaagctctacacagtctgtgagtgtagatactacttacttgtaggattgtcttgtgctttggggatttttgttcggagttctatactatcagcccagaaagctatcaatgtccaagtgaagtgagatgatgcatgccacattattgctttgaccttcacatcaagaaatctgaatgatctggaccagggtcagcaaagtgcagcctacaagttattgcagtcagctgccagtttttacttttttaaatagttgggaaaaaaattccaaagactgatattttgtgtcacatgaaaattatatgaaattcaaattgcagtgtccataagtaaagttttattggggcacacccatgctcacccttttaaatattgtgtatggccgctttgtgctacagtagcagagttgagtcattgcaagggagaccatatggcccaggtagcctaaatatttatctgatcctttacagaaaaagtttgctaacccttgataacagatactctaaaatgcaggtttttcttcttcagtttagctcagtggtaggtcaattgtttgcttttgctattaagcttatgatttggaaacgtaaaattttcatggtggatcttataatcagaactattcaaaagggaaaacatgccagccattttatatgatgaagtctcttattccatagaaaactgtagaaaggtatctgtatctttggagaaggagaaagaaaggaaagaactccagaatcccatcactgttctttaaagcatgcatcacagacctttaagagtatgctttattgagtaaaggttatagtttgactttaagataagaaattttctagaatcatgtttgaattctaaacgttgatattcttaagtaccatttctgattaggaattaggtgttaaaagaatcatggtaaggaaaccttaatccgttgaaactcttgtaatttggacaacaaaaaactagaaataacactcttttctttgaagatctgattcaaatacaccttagaagagtttaaaatctcccaggcctttaggatgcaataggatattatgccttggtttgactccttttcattcaaattaatgtaagtatgttgttcaagactttgaagcattgaacaatgttctcgacgaattttatttaattactgacattttgtgatatttgaatgttattaagttaaacacttagagttgagtatattcaggggagaaaagtgaatgaaatgactcataataagaaagcttgctcccttgggacagttaccttcctggtgtcattgccatcctgggttgacaagctgagagtagaggatacaagtgatgtgaataaaatggaaattgcattgagttaatgaaacatacacttttagatcaagataacattcaacagcctttttagaaattgcacactcctatagtcccacttactcaaggaggtgggggcagggaggatcactggagtacaggagtttggggctgtagtgtgtaatgatcaacacctgtgaaagaataaccactgcactccaacctgggcaacatggcaagaccctgtctctttaaaaaaaaaaaaaaatcctgggaaaagaagtcaaagatgtaattttacacaatttctgcccccaccgtcttttttgtttgtttgtttgtttgtttgttttttggctagatactaggtattcagtgtttgctgagatgacaggtttctactaatcagccagttatttgggaaggagaaaaactttttctcaattctgaacatgatgcagcttgttaactctccagatagtgcctttgattgaaaataaggtctacacctttttaagtatattatttctgacatcgtaagaaataatttagttccttattctcatttatcttttatataatgtactgtaatattcaggtttaaagtaaaataagtatatggaattatattttggtaaaactgtttcatgaccagcttgattaatgtatattaacataccagacattgacagcgaacatttcatgaaatcagttatttacttactaaaacaatgagttttagcttgaaagttactgctgctctattattaacaaaactaagttttaaaaattaattttaattctactgaagtttaatttctggttaaaggtatagtggatgctatttatgatccaagtttttacatcacatccattgatctgcctatcccttctttttactccaaagaggagatgatagaataatacattcagtatactaccaagaagcaaagttataatgtgtttcattttgctattggaattttttattgtaacattgtatgataacctgaaatgtttacttgtgccttttctttaaacaattaaagttttccattttataagaaacaaaaaaaaaaaa

SEQ ID NO: 22698 - DNA, 4353 bp, Homo Sapiens
gcgaaggacggcaccaaggacgggctggagaggaccagggcagccgtgaagaggggccgctccttcatcaggaccaagtctctcatcgcacaggatcacagatcttctcttgaggaagaacagaatttsttcattgatgttgactgcaagcacccggaagccatcttgaccccgatgcccgagggtttatctcagcagcaggttgtaagaagatatatactgggttcagttgtcgacagtgaaaagaactacgtagatgctcttaagaggattttggagcaatatgagaagccgctgtctgagatggagccaaaggttctgagtgagaggaagctgaagacggtgttctaccgagtcaaagagatcctgcagtgccactcgctatttcagatcgcgctggccagccgcgtttccgagtgggactccgtggaaatgataggcgatgtcttcgtggcttcgttttctaagtccatggtgctggatgcatacagtgaatatgtgaacaatttcagcacagccgtggcagtcctcaagaaaacatgtgccacaaagcccgcttttcttgaatttttaaagcaggaacaggaggccagccccgatcgaaccacgctctacagcctgatgatgaagcccrtccagaggttcccacagttcatcctcctgctccaggacatgctgaagaacacctccaaaggccaccccgacaggctgcctcttcagatggccctgacagagctcgaaacactagcagagaagttaaatgaaagaaagagagatgctgatcaacgctgtgaagtgaarcaaatagccaaagccataaacgaaagatacctgaacaagcttctcagcagtggaagccgatacctcattcgatcagatgatatgatagaaacagtttacaacgacagaggagagattgttaaaaccaaagaacgccgagtcttcatgttaaatgatgtgttaatgtgtgccaccgtcagctcacgcccctctcatgacagccgtgtgatgagcagccagaggtacttgctgaagtggagcgttccactgggacatgtggacgccatcgagtayggcagcagcgcaggcacgggcgagcacagcaggcaccttgccgttcacccgccggagagcctggccgtggttgctaacgcgaaaccaaacaaagtttacatggggccaggacaactgtatcaagatttacaaaacttgttgcatgacttaaatgtaattggccaaatcactcagctgataggaaaccttaaaggaaactatcagaacttaaaccagtcagtagcccatgactggacatcaggtttacaaaggcttattttgaagaaagaagatgaaatcagagctgcggactgctgcagaattcagttacagcttcccgggaagcaggacaaatctgggcgaccgacgttctttacagctgtgttcaawacgttcacccctgccatcaaggagtcctgggtcaacagcttacagatggccaagctcgccctagaagaggagaaccacatgggctggttctgtgtggaagacgatgggaatcacattaaaaaggagaagcatcctctcctcgtcggacacatgccygtgatggtggccaagcagcaggagttcaagatcggaagttgcacccatcaaatgggtcagattgccatcgtctcgtttcaaaattccactcccaaagtcattgagtgcttcaacgtggaatctcgcatcctgtgcatgctgtacgttcccgtcgaggagaagcgcagagagcctggggcacccccggaccccgagaccccggccgtgagagcttctgatgtccccacgatctgtgtagggacggaggagggaagcatttccatttataaaagcagtcaaggctccaagaaagtgagacttcagcactttttcactcctgagaagtcctcagtcatgagcctggcttgcacgtctcagagcctgtacgctggcctggtcaacggggcagtcgccacctacgccagagccccagatggatcctgggattcagagcctcaaaaagtgatcaagttaggcgtcctaccagttagaagtctactcatgatggaagacacgttgtgggcggcttccggaggtcaagtcttcatcatcagtgtggagactcatgctgtagagggtcagctggaggcccaccaggaggaaggcatggtgatctcccacatggccgtgtccggcgtcgggatctggattgccttcacctcagggtccacgctccgcctttttcacacggaaactctcaagcacctgcaggacatcaacatcgccacccctgttcacaacatgctgccagggcaccagcggctgtcggtgacgagcctgctcgtctgccacggattgctgatggtcggcaccagcctgggagtcctcgtggccctgccggtcccacgtctgcaagggattcccaaagtgaccggaagaggcatggtctcctaccatgcacacaacagtcctgtcaaattcatcgtcctggccacggctctgcacgagaaagacaaggacaaatccagggacagcctggctcctggccccgagcctcaggacgaagaccagaaggacgcacttccgagtggaggagctggttcatctctgagccagggtgaccctgacgcagccatctggttgggagattcactgggatcgatgactcagaaaagcgacctgtcctcctcatctgggtccctgagcttgtctcacggctccagctctctagagcacagatcagaggacagcaccatctatgatctcctgaaggatcctgtctcgctgagaagcaaagcacgccgggccaagaaagccaaggccagctcggcgctggtggtctgtggagggcagggccaccgccgggtgcacaggaaggcccggcagccccaccaggaagagctggcgccgaccgtcatggtctggcagatccctctgctgaatatataagcaggacggccgccttctgctgtcagaatttgcaatcaagggtgacttctcagctaatcctacagcctgagtggttaagctgtgtctacactggttgggaataaattaaaaacagtatttgggggagaaacgtgcaatagcgtaatggtggtgtccctgccaattccttccttctcttctgtacagcagaagtaattacaagcacttctcacgaaggcagaagactgatgcaattttcgagtaattgagtgcagttctgggaaaataccacattctttttgactgctgtagtccatatatgaatactaaatgttaaacttcatcagcgtcagacctattgtatcatattagagaatttgcagactaagaatttatgagaaaatatatgtattcggtagtgcaggcatttattaacaattcttaaaagttttacctgattcagattcacgacttttatttatattctatatttttgaatttcagagtaaaatttgttaacaattttaaaagccaggtaacacctaccagtccagttagcatgatttgctttcagaagtgagctgggttttccaaagtggtataatgtgtgtactgtatattttaacaaagtaatatttttgtattgcatttttctattaaaaaattaacagttaatgtttcagtcaatgyattatctgtagcatttcacaaataatgtttgctttgaaccaaaatgctcagtgcctatcaacatttggactcaagcatcaacaccaaattattcctcccttctcgtataaatagagtgactatccacaggagaaaagtgtgtgctttagtattagaggagataggcagagaagtcttgcttagttccttcgtgcagcttcttgcccctgttgacgtggaatgctgtgtctgctttagcacgcacgctccgaatgactcctggtgctaggccatgctggctgctgtcactgagcgggactcaggccaagaggcgtgacctcgggccagcctgtctgttgtgcagacgcctcctctgcagaacgcatcagtttctattctgcagttgcagagccagccccgcgtgagaacgtgcataatgagtgcacaccatcatgtcaaggtgcatacttagtgagcgccatcctgctgaacgtgtatttcagtgtttcacttactggacggataacaagaaaaaaatcctaacacaggcagtcaccagaaataaatgtctcagcactttacagatgactaaaaatgttaattttatgacttagccaaatatgttctaggttgcatatatcccccatgtgaaagtgatttcttcccaagcttctcaaactgttagctgctgtctgacttcatcaataaagtatttttattttaaaatgyaaaaaaaaa

SEQ ID NO: 22699 - DNA, 3323 bp, Homo Sapiens
tagtggtgggtaagaaaattggaagtattccctcctcatttggtgggttggtggctgggaatatctgttcccttggaaatgtttgatgctactctgaaagatcgagaactgagctttcagtcggctccaaggtactaccatgtttctgcattggctagtgggaatggtatatgtcttctactttgcctccttcattctactactgagagaggtacttcgacctggtgtcctgtggtttctaaggaatttgaatgatccagatttcaatccagtacaggaaatgatccatttgccaatatataggcatctccgaagatttattttgtcagtgattgtctttggctccattgtcctcctgatgctttggcttcctatacgtataattaagagtgtgctgcctaattttcttccatacaatgtcatgctctacagtgatgctccagtgagtgaactgtccctcgagctgcttctgcttcaggttgtcttgccagcattactcgaacagggacacacgaagcagtggctgaaggggctggtgcgagcgtggactgtgaccgccggatacttgctggatcttcattcttatttattgggagaccaggaagaaaatgaaaacagtgcaaatcaacaagttaacaataatcagcatgctcgaaataacaacgctattcctgtggtgggagaaggccttcatgcagcccaccaagccatactccagcagggagggcctgttggttttcagctttaccgccgacctttaaattttccactcaggatatttctgttgattgtcttcatgtgtataacattactgattgccagcctcatctgccttactttaccagtatttgctggccgttggttaatgtcgttttggacggggactgccaaaatccatgagctctacacagctgcttgtggtctctatgtttgctggctaaccataagggctgtgacggtgatggtggcatggatgcctcagggacgcagagtgatcttccagaaggttaaagagtggtctctcatgatcatgaagactttgatagttgcggtgctgttggctggagttgtccctctccttctggggctcctgtttgagctggtcattgtggctcccctgagggttcccttggatcagactcctcttttttatccatggcaggactgggcacttggagtcctgcatgccaaaatcattgcagctataacattgatgggtcctcagtggtggttgaaaactgtaattgaacaggtttacgcaaatggcatccggaacattgaccttcactatattgttcgtaaactggcagctcccgtgatctctgtgctgttgctttccctgtgtgtaccttatgtcatagcttctggtgttgttcctttactaggtgttactgcggaaatgcaaaacttagtccatcggcggatttatccatttttactgatggtcgtggtattgatggcaattttgtccttccaagtccgccagtttaagcgcctttatgaacatattaaaaatgacaagtaccttgtgggtcaacgactcgtgaactacgaacggaaatctggcaaacaaggctcatctccaccacctccacagtcatcccaagaataaagtagttgtctcaacaacttgaccttcccctttacatgtccttttttgtggacttctctctttggagatttttcccagtgatctctcagcgttgtttttaagttaaatgtatttgacttgtgttctcagcattcagagagcagcggtgtaagattctgctgttctccctggatcttctgacattactgctgtctgagatttgtatatgtgtaaatacaagttccttgataccctaaaaccttggattaaacagaatgtgcattgtacatctttaaacaaaatgtatattaatttattaaatctagttgtcactttattttggacctgctgtgatctcgacaggaaacgtgccacagagcagtagtgcgcaggcaagacttttcagtgacgccttgtggaacgcagttcatgatgtcctagcagctctcactaagggaactgtacattctttctttcttggctattcagaccttaccaagaacgttaaaggaaacaagtagaaatcagcagtggagtgtctgtggtaagaaaacatgaactttatgcttcactgttagttgtttgtggaagttattttgtataacaccaaagctgttgtacatttcctactgcctgatttttttcatgtgtctgtgtttgtaatattgtatagtatcttgtgctaggtgaggaaattattttttaattttgataatttaatattcctagtgtgatcagcattgggagttgggtttcagtggggcatgtctatacttagagaaaaaaagtcccaatgaagattttcatgagtcagcccccccgcccgcccccaccccacacccacatcctctcttttccacacacaactatctgtttattttttgtagcagtggccgaaagtcctgcaaggtcataaatctttcagagtgacatcaccaactgtactgcatcttactggatttaggacttctgagatgcttgtgaagtatagatgtggttgtggtcttagattgacagcattagagaagactggttagaacatctggtctcgctggttagtgcctcgttggctgaggactaggtgtgcatttctcctagcttttcatcaggaaatcccaaagtttccaaagctttttgtttacagaataaaacttcaaataaaaccaattcattatttgtccagaaggaagcttggctgagctggccttttaacataggaatgtatttcgttggaaacattctgaaaaatctcagagaactgaacccttacaaactttgttttccctcataaccaaagcttcaggttagaagtttagaaaaatagaatggttgggtacatgatctaaatgtttaatgctaaaggtatatcgtaagggtagtgtttgtttttgaacgataatttagaagttctcatagaaagcgtataacataggtcttcagaaactataaaagaattttcatatagtattaaaatccatagactaaaatctgagaattttttaacatatgcaagtcagccaaacataagctaccaaaataaagagcaatgtgttctggctgttttatacttcaacaattttttccctaagtggtaagcaattactttaaaacatatttttaaaaacatcggtatcgggagctgcggtggctccggccggttgtcctggcacacaaggaggcgaggctatgcgttcgaggccaacctaggcaaaattggaaaaaaaaaaaaaaa

SEQ ID NO: 22700 - DNA, 1484 bp, Homo Sapiens
  misc_feature (496)..(496): n is a, c, g, or t
tgtttctgtttctcttcaggcaagtccatagatagaggaaaatcagacacaggctggtgacaactggtatagatacagtgagcatggaatgagaaccacctacaacattgcctgattatttttaagtttatatcaaaactgcttcacaagttcacaaaagttgtcactcttaatttgggttaagaaaagtaatagtattatctctgctgaagttgattgtttttctcttttaccatgactgttggccaaaagcaagctgaacctctgcactttggaaacaaagcacagtatggaatctttaacccaagcacttagtttcaccactgaggattctacatcatctgcaaggaaaatgcacaaacttttgggtcccaatgttggattcttcaaaagtgcatagcaaaacttttgtgctatgccgcttgatgtaacttttaaagatgttatcaaatgttaaatgcctcattctgcgttaatttgctgttggctgttttgngaacacaaaataaacttgagattttttttttttttttttttgtgaaactcctccaaagccaatttcagcccttggtaagcttgcagacagttactgatcttaaatttaattttaaaagacaatgtatcttaattataatttagctttttaaaacaatgagatagctttacatttcccctttgtttgaatgagaaaatggatcttgggttgctatgctagaacacttgtagattgctgggtcctttgtaagggggccatggacacaccacactttctttcaatccttacatttgaagcattgatattcttcaaaaccttcttgttacatgtgcgcaatagaaatttctaatgttcatgacttttatctttcctgtccatcaattcactggttgtaaatgcttcctgagagctgtctaggtctgtatcccagattgttgcttaatgacatctgacagatgcattgttttctgaaatcagcttaagacaccaattgtggcaactggaaactcattacctgctgcattggatcaactatggaagttggagcaggggtgggcggaggtcacctaaccaatcaatggaaggcaactcacacctgctccaagcctcagctttgagaaacaaacacgtttataagaaaaaatatatagctattattacagaagtgaatatgttgtgctctcttactgctcttggtgcattgacagtttctgtatctcaaccctattcatctttatgaaaaagcattctgaagatctatcctcagcactgctgagtgtgcagtcacactttcctaccaacccccttcttaccatctctagctgccatttgtggggggaacaaaacaagggaatcctgattgtgtacagtataaattgtattatattttttgtacttatgttttatgtaaatagtttgtctcattcaattgtatgtgagcattgaaataaatcctaccatttaggggaaaaaaaaaaaaaaaaaaaaa

SEQ ID NO: 22701 - DNA, 3410 bp, Homo Sapiens
gaattcgaggatccgggtaccatgggcggcggcaggcctagcagcacgggaaccgtcccccgcgcgcatgcgcgcgcccctgaagcgcctgggggacgggtatgggcgggaggtaggggcgcggctccgcgtgccagttgggtgcccgcgcgtcacgtggtgaggaaggaggcggaggtctgagtttcgagggagggggggagagaagagggaacgagcaagggaaggaaagcggggaaaggaggaaggaaacgaacgagggggagggaggtccctgttttggaggagctaggagcgttgccggcccctgaagtggagcgagagggaggtgcttcgccgtttctcctgccaggggaggtcccggcttcccgtggaggctccggaccaagccccttcagcttctccctccggatcgatgtgctgctgttaacccgtgaggaggcggcggcggcggcagcggcagcggaagatggtgttgctgagagtgttaattctgctcctctcctgggcggcggggatgggaggtcagtatgggaatcctttaaataaatatatcagacattatgaaggattatcttacaatgtggattcattacaccaaaaacaccagcgtgccaaaagagcagtctcacatgaagaccaatttttacgtctagatttccatgcccatggaagacatttcaacctacgaatgaagagggacacttcccttttcagtgatgaatttaaagtagaaacatcaaataaagtacttgattatgatacctctcatatttacactggacatatttatggtgaagaaggaagttttagccatgggtctgttattgatggaagatttgaaggattcatccagactcgtggtggcacattttatgttgagccagcagagagatatattaaagaccgaactctgccatttcactctgtcatttatcatgaagatgatattaactatccccataaatacggtcctcaggggggctgtgcagatcattcagtatttgaaagaatgaggaaataccagatgactggtgtagaggaagtaacacagatacctcaagaagaacatgctgctaatggtccagaacttctgaggaaaaaacgtacaacttcagctgaaaaaaatacttgtcagctttatattcagactgatcatttgttctttaaatattacggaacacgagaagctgtgattgcccagatatccagtcatgttaaagcgattgatacaatttaccagaccacagacttctccggaatccgtaacatcagtttcatggtgaaacgcataagaatcaatacaactgctgatgagaaggaccctacaaatcctttccgtttcccaaatattggtgtggagaagtttctggaattgaattctgagcagaatcatgatgactactgtttggcctatgtcttcacagaccgagattttgatgatggcgtacttggtctggcttgggttggagcaccttcaggaagctctggaggaatatgtgaaaaaagtaaactctattcagatggtaagaagaagtccttaaacactggaattattactgttcagaactatgggtctcatgtacctcccaaagtctctcacattacttttgctcacgaagttggacataactttggatccccacatgattctggaacagagtgcacaccaggagaatctaagaatttgggtcaaaaagaaaatggcaattacatcatgtatgcaagagcaacatctggggacaaacttaacaacaataaattctcactctgtagtattagaaatataagccaagttcttgagaagaagagaaacaactgttttgttgaatctggccaacctatttgtggaaatggaatggtagaacaaggtgaagaatgtgattgtggctatagtgaccagtgtaaagatgaatgctgcttcgatgcaaatcaaccagagggaagaaaatgcaaactgaaacctgggaaacagtgcagtccaagtcaaggtccttgttgtacagcacagtgtgcattcaagtcaaagtctgagaagtgtcgggatgattcagactgtgcaagggaaggaatatgtaatggcttcacagctctctgcccagcatctgaccctaaaccaaacttcacagactgtaataggcatacacaagtgtgcattaatgggcaatgtgcaggttctatctgtgagaaatatggcttagaggagtgtacgtgtgccagttctgatggcaaagatgataaagaattatgccatgtatgctgtatgaagaaaatggacccatcaacttgtgccagtacagggtctgtgcagtggagtaggcacttcagtggtcgaaccatcaccctgcaacctggatccccttgcaacgattttagaggttactgtgatgttttcatgcggtgcagattagtagatgctgatggtcctctagctaggcttaaaaaagcaatttttagtccagagctctatgaaaacattgctgaatggattgtggctcattggtgggcagtattacttatgggaattgctctgatcatgctaatggctggatttattaagatatgcagtgttcatactccaagtagtaatccaaagttgcctcctcctaaaccacttccaggcactttaaagaggaggagacctccacagcccattcagcaaccccagcgtcagcggccccgagagagttatcaaatgggacacatgagacgctaactgcagcttttgccttggttcttcctagtgcctacaatgggaaaacttcactccaaagagaaacctattaagtcatcatctccaaactaaaccctcacaagtaacagttgaagaaaaaatggcaagagatcatatcctcagaccaggtggaattacttaaattttaaagcctgaaaattccaatttgggggtgggaggtggaaaaggaacccaattttcttatgaacagatatttttaacttaatggcacaaagtcttagaatattattatgtgccccgtgttccctgttcttcgttgctgcattttcttcacttgcaggcaaacttggctctcaataaacttttaccacaaattgaaataaatatatttttttcaactgccaatcaaggctaggaggctcgaccacctcaacattggagacatcacttgccaatgtacataccttgttatatgcagacatgtatttcttacgtacactgtacttctgtgtgcaattgtaaacagaaattgcaatatggatgtttctttgtattataaaatttttccgctcttaattaaaaattactgtttaattgacatactcaggataacagagaatggtggtattcagtggtccaggattctgtaatgctttacacaggcagttttgaaatgaaaatcaatttaccccatggtacccggatcctcgaattc

SEQ ID NO: 22702 - DNA, 15789 bp, Homo Sapiens
atggacagccagaacctggctggtgaggataaagattcacaaccggcagctgatggacctgcagcctctgaggacccaagtgccactgagtcagacctgcccaacccacatgtgggagaggtctctgtccttagttctgggagtcccaggcttcaggagactcctcaggactgcagtgggggtccggtgcggcgttgtgctctctgtaactgcggggagcccgctctacacgggcagcgggagctacggcgctttgagttgccatttgattggccccggtgtccagtggtgtcccctggggggagcccagggcccaatgaggcagtgctgcccagtgaggacctatcacagattggtttccctgagggccttacacctgcccacctaggagaacctggagggtcctgctgggctcaccattggtgtgctgcatggtcggcaggcgtatgggggcaggagggcccacaactatgtggtgtggacaaggccatcttctcagggatctcacagcgctgctcccactgcaccaggctcggtgcctccatcccttgccgctcacctggatgtccacggctttaccacttcccctgcgcgactgccagcggttccttcctatccatgaaaacactgcagctgctatgcccagagcacagtgagggggctgcatatctggaggaggctcgctgtgcagtgtgtgaggggccaggggagctgtgtgacctgttcttctgtaccagctgtgggcatcactatcacggggcctgcctggacactgctctgactgcccgcaaacgtgctggctggcagtgccctgaatgcaaagtgtgccaagcctgcaggaaacctgggaatgactctaagatgttggtttgcgagacgtgtgacaaaggataccatactttctgcctaaaaccacccatggaggaactgcctgctcactcttggaagtgcaaggcgtgccgggtgtgccgggcctgtggggcgggctcagcagaactgaatcccaactcggagtggtttgagaactactctctctgtcaccgctgtcacaaagcccagggaggtcagactatccgctccgttgctgagcagcataccccggtgtgtagcagattttcacccccagagcctggcgatacccccactgacgagcccgatgctctgtacgttgcatgccaagggcagccaaagggtgggcacgtgacctctatgcaacccaaggaaccagggcccctgcaatgtgaagccaaaccactagggaaagcaggggtccaacttgagccccagttggaggcccccctaaacgaggagatgccactgctgcccccacctgaggagtcacccctgtccccaccacctgaggaatcacccacgtccccaccacctgaggcatcacgcctgtcgccaccacctgaggaattgcccgcatccccacttcctgaggcattgcacctgtcccggccgctggaggaatcgcccctctctccgccgcctgaggagtctcctctgtctcccccacctgaatcatcacctttttctccactggaggagtcgcccttgtctccaccggaagagtcacccccatctcctgcacttgagacgcctctatccccaccacctgaagcatcgcccctgtccccaccatttgaagaatctcctttgtccccgccacctgaggaattgcccacttccccgccacctgaagcatctcgcctgtctccaccacctgaggagtcacccatgtcccctccacctgaagagtcacccatgtctccaccaccggaggcatctcgtctgttcccaccatttgaagagtctcctctgtcccctccacctgaggagtctcccctttccccaccacctgaggcatcacgcctgtccccaccacctgaggactcgcctatgtccccaccacctgaagaatcacctatgtcccccccacctgaggtatcgcgcctatcccccctgcctgtggtgtcacgcctgtctccaccgcctgaggaatctcccttgtccccaccggccctgtctcctttgggggagttagagtacccctttggtgccaaaggggacagtgaccctgagtcaccgttggctgcccccatcctggagacacccatcagccctccaccagaagctaactgcactgaccctgagcctgtcccccctatgatccttcccccatctccaggctccccagtggggccggcttctcccatcctgatggagccccttcctcctcagtgttcgccactccttcagcattccctggttccccaaaactcccctccttcccagtgctctcctcctgccctaccactgtccgttccctccccgttgagtcccatagggaaggtagtgggggtctcagatgaggctgagctgcacgagatggagactgagaaagtttcagaacctgaatgcccagccttggaacccagtgccaccagtcctctcccttccccaatgggggacctttcctgccccgcccccagccctgccccagccctggatgacttctctggcctaggggaagacacagcccctctggatgggattgatgctccgggttcacagccagagcctggacagacccctggcagtttggctagtgaacttaaaggctcccctgtgctcctggaccccgaggagctggcccctgtgacccctatggaggtctaccccgaatgcaagcagacagcagggcggggctcaccatgtgaagaacaggaagagccacgtgcaccggtggcccccacaccacccactctcatcaaatccgacatcgttaacgagatctctaatctgagccagggtgatgccagtgccagttttcctggctcagagcccctcctgggctctccagacccggaggggggtggctccctgtccatggagttgggggtctctacggatgttagtccagcccgagatgagggctccctacggctctgtactgactcactgccagagactgatgactcactattgtgcgatgctgggacagctatcagcggaggcaaagctgagggggagaaggggcggcggcgcagctccccagcccgttcccgcatcaaacagggtcgcagcagcagtttcccaggaagacgccggcctcgtggaggagcccatggagggcgtggtagaggacgggcccggctaaagtcaactgcttcttccattgagactctggtagttgctgacattgatagctctcccagtaaggaggaggaggaagaagatgatgacaccatgcagaataccgtggttctcttctccaacacagacaaatttgtcctaatgcaggacatgtgtgtggtatgtggcagctttggccggggggcagagggccacctccttgcctgttcgcagtgctctcagtgctatcacccttactgtgtcaacagcaagatcaccaaggtgatgctgctcaagggctggcgttgtgtggagtgtattgtgtgtgaggtgtgtggccaggcctccgacccctcacgcctgctgctctgtgatgactgtgatattagctaccacacatactgcctggaccccccactgctcaccgtccccaagggcggctggaagtgcaagtggtgtgtgtcctgtatgcagtgtggggctgcttcccctggcttccactgtgaatggcagaatagttacacacactgtgggccctgtgccagcctggtgacctgccctatctgtcatgctccttacgtagaagaggacctactaatccagtgccgccactgtgaacggtggatgcatgcaggctgtgagagcctcttcacagaggacgatgtggaccacgcacccgatgaaggctttgactgtgtctcctgccagccctacgtggtaaagcctgtggcgcctgttgcacctccagagctggtgcccatgaaggtgaaagagccagagccccagtactttcgcttcgaaggcgtgtggctgacagaaactggcatggccttgctgcgtaacctgaccatgtcaccactgcacaagcggcgccaacggcgaggacggcttggcctcccaggcgaggcaggattggagggttctgagccctcagatgcccttggccctgatgacaagaaggatggggacctggacaccgatgagctgctcaagggtgaaggtggtgtggagcacatggagtgcgaaattaaactggagggccccgtcagccctgatgtggagcctggcaaagaggagaccgaggaaagcaaaaaacgcaagcgtaaaccatatcggcctggcattggtggtttcatggtgcgacagcggaaatcccacacacgcacgaaaaaggggcctgctgcacaggcggaggtgttgagtggggatgggcagcccgacgaggtgatacctgctgacctgcctgcagagggcgccgtggagcagagcttagctgaaggggatgagaagaagaagcaacagcggcgagggcgcaagaggagcaaactggagggcatgttccctgcttacttgcaggaagccttctttgggaaggagctgctggacctgagccgtaaggccctttttgcagttggggtgggccggccaagctttggactagggaccccaaaagccaagggagatggaggctcagaaaggaaggaactccccacatcgcagaaaggagatgatggtccagatattgcagatgaagaatcccgtggcctcgagggcaaagccgatacaccaggacctgaggatgggggcgtgaaggcatccccagtgcccagtgaccctgagaagccaggcaccccaggtgaagggatgcttagctctgacttagacaggatttccacagaagaactgcccaagatggaatccaaggacctgcagcagctcttcaaggatgttctgggctctgaacgagaacagcatctgggttgtggaacccctggcctagaaggcagccgtacgccactgcagaggccctttcttcaaggtggactccctttgggcaatctgccctccagcagcccaatggactcctacccaggcctctgccagtccccgttcctggattctagggagcgcgggggcttctttagcccggaacccggtgagcccgacagcccctggacgggctcaggtggcaccacgccctccacccccacaacccccaccacggagggtgagggcgacggactctcctataaccagcggagtcttcagcgctgggagaaggatgaggagttgggccagctgtccaccatctcgcctgtgctctatgccaacattaattttcctaatctcaagcaagactacccagactggtcaagccgttgcaaacaaatcatgaagctctggagaaaggttccagcagctgacaaagccccctacctgcaaaaggccaaagataaccgggcagctcaccgcatcaacaaggtgcagaagcaggctgagagccagatcaacaagcagaccaaggtgggcgacatagcccgtaagactgaccgaccggccctacatctccgcattcccccgcagccaggggcactgggcagcccgccccccgctgctgcccccaccattttcattggcagccccactacccccgccggcttgtctacctctgcggacgggttcctgaagccgccggcgggctcggtgcctggccctgactcgcctggtgagctcttcctcaagctcccaccccaggtgcccgcccaagcgccttcgcaggacccctttggactggcccctgcctatcccctggagccccgcttccccacggcaccgcccacctatcccccctatcctagtcctacgggggcccctgcgcagcccccgatgctgggcgcctcatctcgtcctggggctggccagccaggggaattccacactaccccacctggcacccccagacaccagccctccacacctgacccgttcctcaaaccccgctgcccctcgctggataacttggctgtgcctgagagccctggggtagggggaggcaaagcttccgagcccctgctctcgcccccaccttttggggagtcccggaaggccctagaggtgaagaaggaagagcttggggcatcctctcctagctatgggcccccaaacctgggctttgttgactcaccctcctcaggcacccacctgggtggcctggagttaaagacacctgatgtcttcaaagcccccctgacccctcgggcatctcaggtagagccccagagcccgggcttgggcctaaggccccaggagccaccccctgcccaggctttggcaccttctcctccaagtcacccagacatctttcgccctggctcctacactgacccatatgctcagcccccattgactcctcggccccaacctccgccccctgagagctgctgtgctctgccccctcgctcactgccctccgaccctttctcccgagtgcctgtcagtcctcagtcccagtccagctcccagtctccactgacaccccggcctctgtctgctgaagctttttgcccatcacccgttacccctcgcttccagtcccctgacccttattctcgcccaccctcacgccctcagtcccgtgacccatttgccccattgcataagccaccccgaccccagccccctgaagttgcctttaaggctgggtctctagcccacacttcgctgggggctggggggttcccagcagccctgcccgcggggccagcaggtgagctccatgccaaggtcccaagtgggcagccccccaattttgtccggtcccctgggacgggtgcatttgtgggcaccccctctcccatgcgtttcactttccctcaggcagtaggggagccttccctaaagccccctgtccctcagcctggtctcccgccaccccatgggatcaacagccattttgggcccggccccaccttgggcaagcctcaaagcacaaactacacagtagccacagggaacttccacccatcgggcagccccctggggcccagcagcgggtccacaggggagagctatgggctgtccccactacgccctccgtcggttctgccaccacctgcacccgacggatccctcccctacctgtcccatggagcctcacagcgatcaggcatcacctctcctgtcgaaaagcgagaagacccagggactggaatgggtagctctttggcgacagctgaactcccaggtacccaggacccaggcatgtccggccttagccaaacagagctggagaagcaacggcagcgccagcggctacgagagctgctgattcggcagcagatccagcgcaacaccctgcggcaggagaaggaaacagctgcagcagctgcgggagcagtggggcctccaggcagctggggtgctgagcccagcagccctgcctttgagcagctgagtcgaggccagaccccctttgctgggacacaggacaagagcagccttgtggggttgcccccaagcaagctgagtggccccatcctggggccagggtccttccctagcgatgaccgactctcccggccacctccaccagccacgccttcctctatggatgtgaacagccggcaactggtaggaggctcccaagctttctatcagcgagcaccctatcctgggtccctgcccttacagcagcaacagcaacaactgtggcagcaacaacaggcaacagcagcaacctccatgcgatttgccatgtcagctcgctttccatcaactcctggacctgaacttggccgccaagccctaggttccccgttggcgggaatttccacccgtctgccaggccctggtgagccagtgcctggtccagctggtcctgcccagttcattgagctgcggcacaatgtacagaaaggactgggacctgggggcactccgtttcctggtcagggcccacctcagagaccccgtttttaccctgtaagtgaggacccccaccgactggctcctgaagggcttcggggcctggcggtatcaggtcttcccccacagaaaccctcagccccaccggcccctgaattgaacaacagtcttcatccaacaccccacaccaagggtcctaccctgccaactggtttggagctggtcaaccggcccccgtcgagcactgagcttggccgccccaatcctctggccctggaagctgggaagttgccctgtgaggatcccgagctggatgacgattttgatgcccacaaggccctagaggatgatgaagagcttgctcacctgggtctgggtgtggatgtggccaagggtgatgatgaacttggcaccttagaaaacctggagaccaatgacccccacttggatgacctgctcaatggagacgagtttgacctgctggcatatactgatcctgagctggacactggggacaagaaggatatcttcaatgagcacctgaggctggtagaatcggctaatgaggaggctgaacgggaggccctgctgcggggggtggagccaggacccttgggccctgaggagcgccctccccctgctgctgatgcctctgaaccccgcctggcatctgtgctccctgaggtgaagcccaaggtggaggagggtggacgccacccttctccttgccaattcaccattgctacccccaaggtagagcccgcacctgctgccaattcccttggcctggggctaaagccaggacagagcatgatgggcagccgggatacccggatgggcacagggccattttctagcagtgggcacacagctgagaaggcctcctttggggccacgggagggccaccagctcacctgctgacccccagcccactgagtggcccaggaggatcctccctgctggaaaagtttgagctcgagagtggggctttgaccttgcctggtggacctgcagcatctggggatgagctagacaagatggagagctcactggtagccagcgagttacccctgctcattgaggacctgttggagcatgagaagaaggagctgcagaagaagcagcagctttcagcacagttgcagcctgcccagcagcagcagcaacagcagcagcagcattccctactgcctgcaccaggccctgcccaggccatgtctttgccacatgagggctcttctcccagtttggctgggtcccaacagcagctttccctgggtcttgcagttgcccgacagccaggtttgccccagccactgatgcccacccagccaccagctcatgccctccagcaacgcctggctccatccatggctatggtgtccaatcaagggcatatgctaagtgggcagcatggagggcaggcaggcttggtaccccagcagagctcacagccagtgctatcacagaagcccatgggcaccatgccaccttccatgtgcatgaagccgcagcaattggcaatgcagcagcagctggcaaacagcttcttcccagatacagacctggacaaatttgctgcagaagatatcattggtcccattgcaaaggccaagatggtggctttgaaaggcatcaagaaagtgatggctcagggcagcattggggtggcacctggtatgaacagacagcaagtgtctctgctagcccagaggctctcggggggacctagcagtgatctgcagaaccatgtggcagctgggagtggccaggagcggagtgctggtgatccctcccagcctcgtcccaacccgcccacttttgctcagggagtgatcaatgaagctgaccagcggcagtatgaggagtggctgttccatacccagcagctcctacagatgcagctgaaggtgctagaggagcagattggtgtacaccgcaagtcccggaaggctctgtgtgccaagcagcgcactgccaaaaaagctggccgtgagttcccagaagctgatgctgagaagctcaagctggttacagagcagcagagcaagatccagaaacaactggatcaggtccggaaacagcagaaggagcacactaatctcatggcagaatatcggaacaagcagcagcaacaacagcagcagcagcagcaacaacagcaacagcactcagctgtgctggctctcagcccttcccagagtccccggctgctcaccaagctccctggtcagctgctccctggccatgggctgcagccaccacaggggcctccgggtgggcaagccggaggtcttcgcctgacccctgggggtatggcactacctggacagcctggtggccccttccttaatacagctctggcccaacagcagcaacagcaacattctggtggggctggatccctggctggcccttcagggggcttcttccctggcaaccttgctcttcgaagcctcggacctgattcaaggcttttacaggaaaggcagctgcagctgcagcagcaacgtatgcagctggcccagaaactgcagcagcagcagcagcagcaacagcagcagcagcaccttctaggacaggtggcaatccagcagcaacagcagcagggtcctggagtacagacaaaccaagctctgggtcccaagccccagggccttatgcctcccagcagccaccaaggcctcctggtccagcagctgtcccctcaaccaccccaggggccccagggcatgctgggccctgcccaggtggctgtgttgcagcagcagcaccctggagctttgggcccccagggccctcacagacaggtgcttatgacccagtcccgggtgctcagttccccccagctggcacagcagggtcagggccttatgggacacaggctggtcacagcccagcagcagcagcagcaacaacagcaccaacagcaagggtccatggcagggctgtcccatcttcagcaaagtctgatgtcacacagtgggcagcccaaactgagcgctcagcccatgggctctttacagcagcttcagcagcagcagcagctgcaacagcaacagcaacttcagcagcagcagcagcagcagctacaacagcaacagcaacttcagcagcaacagcttcaacagcagcaacagcagcagcagcttcaacaacagcagcagcaacagcttcaacagcagcaacagcagctacaacagcaacagcaacaacaacagcagcagtttcaacagcagcagcaacagcagcagatgggccttttaaaccagagtcgaactttactgtcccctcagcaacaacagcagcagcaagtggcacttggccctggcatgccagcaaagcctcttcaacacttttctagccctggagccctgggtccaaccctcctcctgacgggcaaggaacaaaacaccgtagacccagccgtttcttcagaggccactgaggggccctctacacatcagggagggccgttagcaataggaactacccctgagtcaatggccactgaaccaggagaggtaaagccctcactctctggggactcacaactcctgcttgtccaaccccagccccagcctcagcccagctctctgcagctgcagccacctctgaggcttccaggacaacagcagcagcaagttagcctgctccacacagcaggtggaggaagccatgggcagctaggcagtggatcatcttctgaggcctcatctgtgccccacctgctggctcagccctctgtttccttaggggatcagcctgggtccatgacccagaaccttctgggcccccaacagcccatgctagagcggcccatgcaaaataatacagggccacaacctcccaaaccaggacctgtcctccagtctgggcagggtctgcctggggttggaatcatgcctacggtgggtcagcttcgagcacagctccaaggagtcctggccaaaaacccacagctgcggcacttaagtcctcagcagcagcagcagctacaggcactcctcatgcagcggcagctgcagcagagtcaggcagtacgccagaccccaccctaccaggagcctgggacccagacctctcccctccagggcctcctgggctgccaacctcaacttgggggcttccctggaccacagacaggccccctccaggagctaggggcagggcctcgacctcagggcccaccccggctccctgccccaccaggagccttatctacaggaccagtccttggccctgtccatcccacacctccaccatccagccctcaagagccaaagagaccttcacaattaccttcccccagctcccagcttcccactgaggcccagctccctcccacccatccagggacccccaaacctcaggggccaaccttggagccgcctcctgggagggtctcacctgctgctgcccagcttgcagataccttgtttagcaagggtctgggaccttgggatcccccagacaacctagcagaaacccagaagccagagcagagcagcctggtacctgggcatctggaccaggtgaatggacaggtggtgcctgaggcatcccaactcagcatcaagcaggaacctcgggaagagccatgtgccctgggagcccagtcagtgaagagggaggccaatggggagccaataggggcaccaggaaccagcaaccacctcctgctggcaggccctcgctcagaagctgggcatctgctcttgcagaagctactccgggcaaagaatgtgcaactcagcactgggcaggggtccgaggggctgcgagctgagatcaacgggcacattgacagcaagctggctgggctggagcagaaactacagggtacccccagcaacaaggaggatgcagcagcaaggaagcctttgacaccgaagcccaagcgggtacagaaggcaagcgacaggttggtgagctcccgaaagaagctgcggaaggaggacggcgtcagggccagcgaggccttgctgaaacagctgaaacaggagctgtccctgctgcccctaacggagcctgctatcaccgccaattttagcctctttgccccctttggcagtggctgcccagtcaatgggcagagccagctgaggggggcctttggaagtggggcgctgcccactggccctgactactattcccagctgcttaccaagaataacctgagtaacccgccgacaccaccctcgtcgctgccccccaccccacccccatcggtgcagcagaagatggtgaatggcgtcaccccatctgaagagctgggggagcaccccaaggatgctgcctctgcccgggatagtgaaagggcactgagggatacttcagaggtgaagagtctagacctgctggctgccttgcctacaccccctcacaatcagactgaggatgtcaggatggagagtgatgaggatagcgattctcctgacagcattgtgccagcttcatcccctgagagcatcttgggggaggaggcccctcgtttccctcatctgggctcaggccggtgggagcaagaggaccgggccctctcccctgtcatccccctcattcctcgggacagcatcccagtcttcccagataccaaaccttatggggcccttggcctggaggtccctggaaagctgcctgtcacaacttgggaaaagggcaaaggaagtgaggtgtcagtcatgctcacagtctctgctgctgcagacaagaacctgaatggcgtgatggtggcagtggcggagctgctgagcatgaagatccccaactcctatgaggtgctgttcccagagagccccgcccggggaggcactgagccaaagaagggggaagctgagggtcctggtgggaaggaaaagggtctggaaggcaagagcccagacactggccctgattggctgaagcagtttgatgcagtgttggctggctataccctgaagaggcaactagacatcttgagcctcctgaaacaggagagccccgccccagagccacccactcagcacaggtatacctacaatgtctccaatctggatgtgcgacagctctcggccccacctcctgaagaaccctccccgcccccttcccccttggcaccttctcctgccagtccccctactgagcccttggttgaacttcccaccgaacccttggctgagccacccgtcccctcacctctgccactggcctcatcccctgaatcagcccgacccaagccccgtgcccggccccctgaagaaggtgaagatacccgtcctcctcgcctcaagaaatggaaaggagtgcgctggaagcggcttcggctgctgctgaccatccagaagggcagtggacggcaggaggatgagcgggaagtggcagagtttatggagcagcttggcacagccttgcgacctgacaaggtaccgcgagacatgcgtcgctgctgtttctgtcatgaggagggtgacggggccactgatgggcctgcccgtctgctgaacctggacctggacctgtgggtgcacctcaactgtgccctttggtccacggaggtgtatgagacccagggcggagcactgatgaatgtggaggttgccctgcaccgaggactgctaaccaagtgctccctgtgccagcgaactggtgccaccagcagctgcaatcgcatgcgttgccccaatgtctaccattttggttgtgccatccgcgccaagtgcatgttcttcaaggacaagaccatgctgtgtccaatgcataagatcaaggggccctgtgagcaagagctgagctcttttgctgtcttccggcgggtctacattgagcgggacgaggtgaagcaaatcgctagcatcattcagcggggagaacggctgcacatgttccgtgtgggggggcttgtgttccacgccatcggacagctgctgcctcaccagatggctgactttcatagtgccactgccctctatcccgtgggctacgaggccacgcgcatctattggagcctccgcaccaacaatcgtcgctgctgctatcgctgttctattggtgagaacaacgggcggccggagtttgtaatcaaagtcatcgagcagggcctggaggacctggtcttcactgacgcctctccccaggccgtgtggaatcgcatcattgagcctgtggctgccatgagaaaagaggctgacatgctgcgactcttccctgagtatctgaagggcgaggagctctttgggctgacggtgcatgccgtgcttcgcatagctgaatcactgcccggggtggagagctgtcaaaactatttattccgctatgggcgccacccccttatggagctgccactcatgatcaaccccactggctgtgcccgatcagagcctaaaatcctcacacactacaaacggccccataccctgaacagcaccagcatgtctaaggcatatcagagcaccttcacaggcgagaccaacaccccctacagcaagcagtttgtgcactccaagtcatctcagtaccggcggctgcgcaccgaatggaagaacaacgtgtacctggctcgctcccgtatccagggcctggggctctatgcagccaaggacctagaaaagcacacaatggttatcgagtacattggcaccatcattcggaacgaggtggccaaccggcgggagaaaatctacgaagagcagaatcgaggcatctacatgttccgaataaacaatgaacatgtgattgatgctacgttgaccggcggccctgccaggtacattaaccattcctgtgcccctaactgtgtggccgaagtcgtgacatttgacaaagaggacaaaatcatcatcatctccagccggcgaatccccaaaggagaggagctaacctatgactatcagtttgattttgaggacgatcagcacgagatcccctgccactgtggagcctggaattgtcggaaatggatgaactaa

SEQ ID NO: 22703 - DNA, 3486 bp, Homo Sapiens
ccccccccccggccccctggagcgagagcgcgaaggaaatctggccgccgccgccgcgagcgctcccgaatttttacttgttcctgcaaagctgctggagctcagaagctgattctatcacattgtaagatgcctttggataattctacagtcctcttaaatgaatctttagaacttggcaagtctcactagataccttcaatcatcattttgagctcaaagaattctgagacttatggttggtcatatagaagagtaccttgaacctatagtttcctgaagaatcagtttaaaagatccaaggagtacaaaaggagaagtacaaatgtctactacaagacgaaaacgtagtatgttatgttgtttaccgtaagctgtagtaaaatgagctcgattgttgacagagatgacagtagtatttttgatgggttggtggaagaagatgacaaggacaaagcgaaaagagtatctagaaacaaatctgaaaagaaacgtagagatcaatttaatgttctcattaaagaactgggatccatgcttcctggtaatgctagaaagatggacaaatctactgttctgcagaaaagcattgattttttacgaaaacataaagaaatcactgcacagtcagatgctagtgaaattcgacaggactggaaacctacattccttagtaatgaagagtttacacaattaatgttagaggctcttgatggtttttttttagcaatcatgacagatggaagcataatatatgtgtctgagagtgtaacttcattacttgaacatttaccatctgatcttgtggatcaaagtatatttaattttatcccagaaggggaacattcagaggtttataaaatactctctactcatctgctggaaagtgattcattaaccccagaatatttaaaatcaaaaaatcagttagaattctgttgtcacatgctgcgaggaacaatagacccaaaggagccatctacctatgaatatgtaaaatttataggaaatttcaaatctttaaacagtgtatcctcttcagcacacaatggttttgaaggaactatacaacgcacacataggccatcttatgaagatagagtttgttttgtagctactgtcaggttagctacacctcagttcatcaaggaaatgtgcactgttgaagaacccaatgaagagtttacatctagacatagtttagaatggaagtttctgtttctagatcacagggcaccacccataatagggtatttgccatttgaagttctgggaacatcaggctatgattactatcatgtggatgacctagaaaatttggcaaaatgtcatgagcacttaatgcaatatgggaaaggcaaatcatgttattataggttcctgactaaggggcaacagtggatttggcttcagactcattattatatcacttaccatcagtggaattcaaggccagagtttattgtttgtactcacactgtagtaagttatgcagaagttagggctgaaagacgacgagaacttggcattgaagagtctcttcctgagacagctgctgacaaaagccaagattctgggtcagataatcgtataaacacagtcagtctcaaggaagcattggaaaggtttgatcacagcccaaccccttctgcctcttctcggagttcaagaaaatcatctcacacggccgtctcagacccttcctcaacaccaaccaagatcccgacggatacgagcactccacccaggcagcatttaccagctcatgagaagatggtgcaaagaaggtcatcatttagtagtcagtccataaattcccagtctgttggttcatcattaacacagccagtgatgtctcaagctacaaatttaccaattccacaaggcatgtcccagtttcagttttcagctcaattaggagccatgcaacatctgaaagaccaattggaacaacggacacgcatgatagaagcaaatattcatcggcaacaagaagaactaagaaaaattcaagaacaacttcagatggtccatggtcaggggctgcagatgtttttgcaacaatcaaatcctgggttgaattttggttccgttcaactttcttctggaaattcatctaacatccagcaacttgcacctataaatatgcaaggccaagttgttcctactaaccagattcaaagtggaatgaatactggacacattggcacaactcagcacatgatacaacaacagactttacagagtacatcaactcagagtcaacaaaatgtactgagtgggcacagtcagcaaacatctctacccagtcagacacagagcactcttacagccccactgtataacactatggtgatttctcagcctgcagccggaagcatggtccagattccatctagtatgccacaaaacagcacccagagtgctgcagtaactacattcactcaggacaggcagataagattttctcaaggtcaacaacttgtgaccaaattagtgactgctcctgtagcttgtggggcagtcatggtacctagtactatgcttatgggccaggtggtgactgcatatcctacttttgctacacaacagcaacagtcacagacattgtcagtaacgcagcagcagcagcagcagagctcccaggagcagcagctcacttcagttcagcaaccatctcaggctcagctgacccagccaccgcaacaatttttacagacttctaggttgctccatgggaatccctcaactcaactcattctctctgctgcatttcctctacaacagagcaccttccctcagtcacatcaccagcaacatcagtctcagcaacagcagcaactcagccggcacaggactgacagcttgcccgacccttccaaggttcaaccacagtagcacacgtgcttcctctcttgacatcaagggaggaaggggatggcccattaagagttactcagatgacctgaggaaaggagggaaagttccagcagtttcatgagatgcagtattgagtgttctagttcctggaattagttggcagagaaaatgctgcctagtgctacagatgtacattaaataccagccagcaggaggtgatcataggggcacagccagttctgacagtgttttaggtgcctggatattttttgatggaaaaagaatatattgccaaatattaagaagctcagctatgaaatgacctccagggaatcagaaaggcactaatgatgttagtaacttttagtggttctgtgcctcttatcaagtgttacagaggacataccactgccatgtcaggggtttgcttacagtgatgccatgaagacagtccagtagacttggtagcgaccccctcccccaacccctctcccttttcagataatgatggaacagtaattactttcagaatgttgtgtgggttcaaattctctatgtacagatgatgtaaaaatatgtatatgtctagataaaaggagagaaagc

SEQ ID NO: 22704 - DNA, 4208 bp, Homo Sapiens
aacaatgacaagagaaaatgtagcccacaatgctctgagacaagagggccttgtgaaggggaaggatgatacctggaaatggggaaccagcttccaaggaagtagctcctctgtttgggagacctcccacctacactttagacaattacgttaccatgagacatctggaccccaggaagccctgagccggctcagggaactctgtcgccggtggctgagaccagaagcacgcaccaaggcacagatcctggagctgctggtgctggagcagtttctgagcatcctgcctggggagattcggacctgggtacagctccatcaccctggaagtggcgaggaggctgtggccctggtagaggagctgcagaaagaccttgatggaccagcaatacaagttccagtccttgtcaaggatcaggacactctccagaaggtggtgagtgccccaggaacaacacttcctcctgtacttcctggcagccacatagcagctgaaatttgcccgcatcctcctactgacctagtggcattcaacctccaggatcctcagcatgattctcctgcccctgaagcttctgccctttcccaggaagagaacccaagaaatcaattaatggcacttatgctcctaacagcccagccccaggagttggtgatgttcgaggaggtgtcagtatgcttcacttcagaggaatgggcatgtctgggcccaatccagagggccttgtactgggatgtgatgctggagaattatggaaatgtgacctccctagaatgggagaccatgaccgagaatgaggaggtgacatcaaagccaagtagttctcaaagagcagactctcataaaggaacatcaaaaagacttcaaggaagtgttccccaggtccttgattttgaagaagagtgtgaatggcaagttttggcaagtcagtggggaaatgaaacagatgaaagggcagatacagtgaagaaagtttccctttgtgaacgagacaagaagaaaaggactccaccagagaaacaaggccaaaagtggaaggaattaggagacagcttgactttcggttcagctatttctgaaagtttaataggtactgaaggaaagaagttttataaatgtgatatgtgttgtaaacattttaataaaatctcccatcttataaaccatcggagaatccacactggtgagaaacctcataaatgtaaggaatgtggaaaaggctttattcagcgttcgagccttctaatgcatttacggaaccattcaggggagaaaccttataaatgtaatgaatgtgggaaagcattttctcaaagtgcttaccttctaaaccatcagaggatccacactggggagaaaccttataagtgtaaggagtgtggaaagggcttctataggcactcaggcctaattatacatctaaggcgccattcaggggagagaccttataagtgtaatgaatgtgggaaagtcttctctcagaatgcttacctcattgaccatcagaggctccacaaaggggaagaaccttataaatgtaataagtgtcagaaagctttcattctgaagaagagcctcattctgcaccagagaatccactctggggaaaaaccctataaatgtgatgaatgtggaaagacctttgctcagaccacttatcttattgaccatcagcgactccacagtgcagagaacccttacaagtgtaaagaatgtggaaaagttttcattcgaagcaaaagcctcctcttacatcagagagtccacacagaaaagaaaacctttggttgtaaaaagtgtgggaagattttcagttctaagtcaaacttcattgaccataagaggatgcacagcagagagaaaccttacaaatgcactgaatgtgggaaagcctttactcaaagtgcttacctttttgaccaccagagactccacaatggggagaagccctatgaatgtaatgaatgtgggaaagtttttattctgaagaagagcctcattttacatcaaaggttccacactggagagaatctctatgaatgtaaagattgtggtaaggtcttcggttcaaacagaaacctcattgaccatgagagactccacaatggggagaagccatatgaatgtcgagagtgtgggaaaacctttattatgagcaaaagttttatggtccatcagaaactccatacacaagagaaagcctacaaatgtgaggattgtgggaaggctttcagttacaattcaagcctgcttgtacatcggagaatccacaccggagaaaaaccctttgaatgcagtgagtgtggaagagctttcagttcaaacagaaacctcattgagcataagagaatccacagtggtgagaaaccctatgagtgtgatgagtgtggcaaatgcttcattctgaagaaaagcctcattggacatcagagaattcacacgagggaaaaatcttataaatgcaatgactgtgggaaggtcttcagttaccgctcaaaccttatagcccatcagaggatccatactggtgagaagccctatgcgtgtagtgagtgtggaaaaggttttacgtacaacagaaacctgattgaacatcaaagaattcacagtggagaaaaaacctacgaatgtcatgtatgtaggaaagtccttacctctagtagaaatcttatggtacatcaaagaatccatactggagagaaaccttataaatgtaatgagtgtggaaaagactttagtcagaataaaaaccttgttgtacatcagagaatgcacactggggaaaaaccttatgagtgtgacaagtgtaggaaatcctttacttctaagaggaatttagttggccaccagagaattcacacaggggagaaaccctatgggtgtaatgattgtagtaaagtttttaggcaaagaaaaaaccttactgtacatcagaaaatccacacagatgaaaaaccttgtgaatgtgatgtgtctgaaaaagaattctctcagacttccaaccttcatcttcaacagaaaatccataccattgaggaattctcttggctacaaaacaccaatgagtccaagattgagattcagaaaatctagtgtcatatgtaaaatggaatagaatccctgcctacttaagtaactgttggacaaatgatatatatttcttctaaggaaaaagtttattatttactctttactagacaaatgagtagcatatagaagaaagttaataggccgggcttggtggctcatgcctgtaatcccagcactttgagaggccgaagcgagtggatcacctgaggtcaggattttgagaccagcctgaccaacatggtgaaaccccatctctactaaaatacaaaaattatccgggcatgggggcacacaccggtaatcccagctactcaggaggctgagacaggagagtcgcttgaacctgggagggcggaggttgcagtgagccaggatcgcgccattgcactccagcctgggcaacaagagcgaaactcttgtctgaaaaaataaagttcatcccaactttcaagtctacaaaaacataatccaaatctaataacatagttgtaaatgagagcaacaataaaaagtagacatgggctgggtgcagtggctcactcctgtagtcccaggactttgggaggccgaggtgggaagatcccttgagcccaggagttcgagacaagcctgggtaacacggggagacccgtctttagtaaataaaaataaatttattaataaaactaaaaatttaataataaaaagtggacattgttttttaaaatgtgtatagtatgcattttaaagatagtgtccctgctgtggaaaacctgaacagacagtatgatccagaatgtcaggtgtggagttgggcggacaagagtctgctgatgaggacaacctaaaagagcactggatttggaatcagaagacctacctttgattcctggctttcccttaatggccatgtgatgttattaagtcacctctaaagctttagtttcctgtcagtcaaatgttgacatgatacctacctcacagggttgttgtgagggttaagtgaaaggatctttgtgaaagtactttttgaaatcattcagttgtcaataaagttggataaaaaaaaaaaaaaaaaaaaaaactcgagagtacttctagagcgaccgcgggcccatcgattttccacccgggtggg

SEQ ID NO: 22705 - DNA, 6406 bp, Homo Sapiens
caccaggtgaatggctaaagaatctggaataagcttgaaagaaatacaggtcctggcaaggcaatggaaagttggtcctgagaaaagggtgccagcgatgcctggatcgcctgtggaagtgaagatacagtccagatcctcacctcccaccatgccacccctcccaccaataaatcctggaggaccgaggccagtgtccttcactcctactgcattaagcaatggcatcaaccattctcctcctaccctgaatggtgccccatcaccgccacagagattcagcaatggtcctgcctcctccacatcatctgcactcacaaatcagcaattgccagccacttgtggtgctcgacaactcagcaagttgaaacgctttcttaccactctgcaacagtttggcaatgacatctcccctgagattggggagaaggtgcggactcttgttcttgcactggtgaactcaacagtgacaattgaggaattccactgtaagctccaagaagccacaaactttccccttcgtccttttgtgattccatttctcaaggccaacctgcccctgctgcagcgggaactgctgcactgcgctcgggcggccaagcagaccccatcccagtacctggctcagcacgaacaccttctgctcaacacaagcattgcatcgcctgctgactcgtcagagttgctcatggaggtgcacggaaatgggaagaggcccagtccagagaggagagaagagaatagttttgatagagacacaattgctcctgagcctcctgccaagagagtatgtaccatcagccctgctcctcggcacagtcctgctctcactgtgcccctcatgaatcccgggggccaattccatcctacccctccacctcttcagcattacaccttagaggatattgcaacttctcacctgtatcgggaacccaacaagatgctagagcatcgagaagttcgtgatagacaccacagtcttggtctaaatggaggctatcaagatgagttggtagatcatcgtttgacagaaagggaatgggctgatgaatggaaacatcttgaccatgcgctgaattgcattatggaaatggtagagaaaacaaggcgctctatggcagttctgcggcgctgtcaggaatcagatcgtgaagaactcaactactggaaaagacggtacaatgaaaacacagagctgaggaaaacggggaccgagttggtctccaggcagcacagccctgggagtgcagattctctcagcaatgattctcagagagagttcaacagcaggccaggtacaggatacgtacctgtggagttttggaaaaaaacagaagaagctgtgaataaggtgaaaattcaggccatgtcagaagtacagaaggccgtcgctgaggcagagcagaaagcctttgaagtgattgcaacagagagagcacgaatggagcaaaccatagcggatgtcaagcggcaggccgcagaggatgctttcctcgtcatcaatgagcaagaggagtccacggagaactgctggaactgtggccgcaaagccagcgagacatgcagtggctgcaatatcgcgcgatactgtggctctttctgccagcacaaggactgggagcggcaccaccgcctctgtggtcagaacctgcatggccagagcccccacggccagggccggccgctgcttcctgtaggcaggggctcctctgccaggtccgccgactgcagcgtgcccagcccagccctcgacaagacctcggcaaccacatcgcgttcctcaacacctgcttctgtgacagctatcgacaccaacggactctgagccccggactctgcttaccctgatggctgctcagcaccacagagtgcttgggctgagggactgactgttggaacccgtgcatgtagctgccgggtcatcagcaagaaatgaattggaggcaggaagagtccaagcctgaataataacaccccacagcctctctgtgcacttgctgtctgcggagccagtgtgccattctctgcacatgggcagccagcctgagctgcctcctccatggctttcctggtttgttcctctctccactgaagctgacttagccggccccttttcagtgtagaccaccagctcccctccccatctccttgagtcagcagactgtccaatgtgctcagccaggctggaggcggcaggcggcaggcagcaggctgtggaggaggcccctcggtcagggagcggcctgcctcacccctgaatagctccttcggccccatctccatcctcagcagatgacactgattggcctcacggggacttgggtaagcaacaggcggcattcaggactcttctcaaccctgctgttcagacttgataagatctcagagtccacaggaaagaagtcactgttgcaataaaagcacccgtagtagcaaaaacataaacaaataaaacttcccccacatcacagatgattttggacaagattttccaaccttgctggctactttagtttgggacctgttttttttctcatttgattttgcttgtgcagaaaatagtttccagcacatggattgatctgagagagaatgaggctcagttgtggatagtctgttttctctgagcatgttggccaactagtatcgtcaaattattgagtggatcatctcttggaaatgcagaacttctgccaccacttggctatttgcacagtcatcttgttctgtgtccttttatctctcagaccacacacatctggaacgctgtgggcatcttctgcccatgggctccatttggcacctgctgagccacagttgtcctgctggatgtgctgtgcaggttggtaggacttgcccccactgtcaaggcctggtctcatctgaaaagccctcctggacctcaaagaattcttcagacctcatagttacaggtcattatatctactatgttgatttatcatcaggcacacaacttctgtttccttctcttgtgttatctgatagcgtccctccttgagctcatcagaaaggttttatgaaatgtgaaccattttgggaaaagctgatcaatttttcttcctagcttcccattttcaaatgggacatcactcatatccctttcagaatgttaggaactgcctcccacattcttccctgtctttttgggttttgttttttgttgttgttgtggttttttaacacaaagcctgggcaacagagcaaaactctgtctcaaaaaaaaaaaaaaaaaggcaaaattaaagaatttcaagtccctaatttactctaaccaagcattttcagtcttacaaagaaatctagtgcacgacacctttaaaatgcctagatttccattgcctaaagtaaggtgtgaccagtgaaacaacagcagagaatcatgttcctttgctgtggaacacataagccccacagttttccagtcagcctaatacatgggtatcccccgaccccatctgcctccttaagccacagtccttggtggggaactctaagggggacggagtcagtaccccggacagggccacatttgcatgagacatggctgtctcacaggtcacagagccattacaacagcttactagtttttcatggatttgttggattaacaccttaagcaggttttttattgttattttgtttgtttgtttgttttgagacgggagtttctctcttgtctcccaggctggagtgcaatcgcgcaatctcggctcacggtaacctctgcctcccaggttcgggcgagtctcctgcctcagccttctgagtagctgggattgcaggcatgcgccaccacgcccaactgattttgtatttttagtggagacggggtttctccttgttggtcaggctggtctcaaaccccggacctcaggtgatccccccaccttggcctcccaaagtgccaggattacaggcatgagccactgtgtccggtcttgagcaggtttttaaaatctccagtggccataaaactagccagggtagctcatgcttttactggttggaataaggagccaaaaccaacaaaataatatttattagggttggatgcccatttctgtggttaaggcttaggtttggtgtgcagagcctggcctgctcttgtgggctgtggttgctgtgacagtttcgttttctgaatctttgtaatgctcttccaccctgctcgtgctgcccagaggctgatctgcaaacctgggcagtattccacactgaagctcagtttgcaaaccttctgctgtgttaattctggtcagtttcacacagaagtcacgagggcctctgcccaggaccttctattcacatttcaagaatccctttctgaaattctccaactctctggtcaggaggaggagcaccattggggcggggtaggcagctagaggcgcaggagcgaatccaggttccttgcgtggttcccagcctctgctgacagcacctcagctaccaggtggggagtggaaattcagcctgcttagaggactgacctctacagttcatatttgcagtgacataaaaggcaaagaggagctggcatggtggtacagaaggtatcagtcaagcgcaggctcttcagaaacctagaaactaaaaagagatgcaacatgtgactggccatcagccagacatgtctagggtgagaccagtgctcagcaccacccgccaaggaacactgatgagttgtgggacattatggtcggccaagtgaggaatgattgcagggaccagagaagaccaaagatgccagatgtccccagagtttcttgagggctgggtttcacgtctttgcttgtcctttttgtccccacttgcctgcaccgtgcctgactcatccagtggggaaggtgactcaagaagttgtttaagcctaggcctaggcagtccacttcgggaggtgggggcactccacactggggggccctgcagctccagggctggtgctctagcagatccgctcaggcacggttgggtgaccgtggggtcaccgattgcgtagattatttctagggcagtgctgggttagaaatgtctgtctggaaacaggacacatcttgccaccacaagtccacacctggccttggctgctgcccgctctctgcagcgtggatttcctttgcccatttgggccagaaggtcaccaggagttcatcactgcttagtgtcaacttgacatcttcagcttccagacagaaaacccatgctttactttgtacagccctgtcccagagttagtaagcctcggcttgtcacctgcttgcaaagggtatagacatcattctgggtagttctagaggatatcgcaacaagtgcgtttgaaggttcagcacagctggaattgtacggtagtgagctcttcaaaatgaaaacagaatgaccggatggccatctgtcctggaaactgtagaattgaataaatcactgaaaatagaacacttcttggaggctttcttcagaactgaactagaaacaaggtttccaggctcccaggtcagtagaccaaaccaacttccttagatttttttttttaagctgtttgcagaaaactgggtggtagcgtgtctgaaccaaacggaagaatagccagcggagcatggactgttccagcacgggccagatggccagctgtcgagagcagccctgcccagattgcggtgggggctgtgccagcggctccgcagggcccttccaactctggagtgtctgtagttcttgtgaaaccaaaacgttgactacctgcctctttcctcgggcatcgacgtgctcatttccaaagatgatggtgcaggtgaccttttccatcgtgagctaagagaaggttaggaggcctgaggggcgggccttgtgtcccctcctccccctccacagcccctgaggtggagcttccctcacagaccccatctggtcgagcctacggctgcccagtgtacactcagtgatgcttataccaaatagggcatgtgcgctggtgtctgttggggacagccccatccctaccttggagtcggcagagaagcagcaataagcattaggcgaatgattgaaagggctgctgcgccaagaggccttcagtccccttaacgtggctttccaacttcctgacgaggctacaaaggctccgctcacaaaagaaagccaataatgtaaataaatagaaaacgaagcctccacgcgtggtttttaaagggggatgatgaatgtgacaccacccacagaatgcattagaatctggtttttctgtgctttgtcattttactctgataggaatttttgttacctaactctgtgcataacttatttaatgtactgtataaatgaaccaaaactgttaaatatgtatttagtttgttctacttaaagtagtcaataaaaaggctatattcct

SEQ ID NO: 22706 - DNA, 3528 bp, Homo Sapiens
gcatgcacgtgtacatgtgtatgcatgtgtgtgcatgggtatctgcatatgcatgtgcgtgttcatgcatgtgcacgtgtgtgcatgtgtacacatgtgaatctgtgggtatgtatctgagtgtgtgtgcacatgtgaatgtgtgtggctctgaggggtactgcacagatgtgaggaagcagggccacttccccaggaaccctgactgccccctcttcctgccccgggtggggaggcctcagctgcataaagaggccgggagcctcaccagcgactgctgctggtcccacacctgccgctgctgcctcccaggccaggtaccgggagggggccagaggcggagggagctaaggggtctcctgcctcagcgacccaggagcaggtactggccctggggcaaccgccagcagagggtgggcaggggagctgcaggagctctccttctttggagcacaggccctgctgcacagccctttcctgggcacttgcccaccttgggcttggctggtctgcggcatagctgtctctgagggtcgcaggtgctgagtgtggcctcacatcactgggtctataacctcgctggacaccgtccctcctggacggacgactggcttcatcctgaccccagctagagatggtctgggttgagaccatggaggaccaggaacctagactgggcgggcggagccctgggaccctgggcacctgagaagggcagcgggaccagccgggggctggagggaggatggaggattttgtggaggtggagggaccccgacgcccctgtccagggtgtggagggaccccgacgcccctgtccagggtgtggagggaggcacatcatggcctctgggggccgaggggctatggggattgtggactggtggcactttggggtctgggacctgatggtggtgcacgcacggggggctgtgaaggactgatggctgatggggctgctcgggcttgggggctagggagctggaggggccacgagggattgagtggctacgcaggctggggagaccctttggatgctgaaactctgtgggaccctccccaacaacctggatgcggctggggctgggttggtggccatgggtgcactggacactgataccaccagtccccacacacttgagtggtgcttgcctcagtgtccccatctgcctcatgaaggcaactcacccacctggggccctgcatctgcaccaccatgggccggatcacgtgggggcttccacttccgtttaaggcggtaagctccacgtcattgactgtgtaagcagagaggggccagctgccatgcaagcctggagccccggctctgagcgccgcgggctcctaagtgcaggcccctggctgacccctaccccgccccacaggacccgcccgcccgcccctatgaccaacatgagctggagcttcctgacgcggctgctggaggagatccacaaccactccaccttcgtgggcaaggtgtggctcacggtgctggtggtcttccgcatcgtgctgacggctgtgggcggcgaggccatctactcggacgagcaggccaagttcacttgcaacacgcggcagccaggctgcgacaacgtctgctatgacgccttcgcgcccctgtcgcacgtgcgcttctgggtcttccatattgtggtcatctccactccctcggtcatgtacctgggctacgccgtgcaccgcctggcccgtgcgtctgagcaggagcggcgccgcgccctccgccgccgcccggggccacgccgcgcgccccgagcgcacctgccgcccccgcacgccggctggcctgagcccgccgacctgggcgaggaggagcccatgctgggcctgggcgaggaggaggaggaggaggagacgggggcagccgagggcgccggcgaggaagcggaggaggcaggcgcggaggaggcgtgcactaaggcggtcggcgctgacggcaaggcggcagggaccccgggcccgaccgggcaacacgatgggcggaggcgcatccagcgggagggcctgatgcgcgtgtacgtggcccagctggtggccagggcagctttcgaggtggccttcctggtgggccagtacctgctgtacggcttcgaggtgcgaccgttttttccctgcagccgccagccctgcccgcaagtggtggactgcttcgtgtcgcgccctactgaaaagacggttttcctgctggttatgtacgtggtcagctgcctgtgcctgctgctcaacctctgtgagatggcccacctgggcttgggcagcgcgcaggacgcggtgcgcggccgccgcggccccccggcctccgcccccgcccccgcgccgcggcccccgccctgcgccttccctgcggcggccgctggcttggcctgcccgcccgactacagcctggtggtgcgggcggccgagcgcgctcgggcgcatgaccagaacctggcaaacctggccctgcaggcgctgcgcgacggggcagcggctggggaccgcgaccgggacagttcgccgtgcgtcggcctccctgcggcctcccgggggccccccagagcaggcgcccccgcgtcccggacgggcagtgctacctctgcgggcactgtcggggagcagggccggcccggcacccacgagcggccaggagccaagcccagggctggctccgagaagggcagtgccagcagcagggacgggaagaccaccgtgtggatctgagggcgctggcttgcgagctgggccagggaagaggagggttggggggctccggtggaaacctgcgaccccttctcctcagccttctccttagccggtggcctcaggcagactctgcccagaggggcagccaggctgctcagggaaggggctgaaagcggcagaggagtgccctggcttggtcaccactggggccaaggtggggtggagagaggcctacgagccagaaagggccctctgctgtggtctgaaccccagggggagtggggcattgactccacccctgtcctgagctggaataggtcctctgggatgccagctctcccctttgtgcttccctgcagcaacccatggagggcccagggtgcctggtatgggcatcagttggtgggggtgcgggggtgcgtgtccccattccctgcaacagcaaatggggctccttcttcagccctccccttcccagccccaaactgagacagactgggagctgggagcctggggtggacaggaccataccctctttgagcttctgcgatgccggccttccgttcctctgggaggcttgaagttctgcagagatgttgatatgccttgcagcttggacccaatgggtggtggtcagggcctgggggcttggccatgctgggggaatggggctctgggttcctgcctgtggcctgtctgtcctcctccctaattcagacccagcctcaagaggaaagggagtaaaataaaactaacttgtttataaccttgtgtgtgcatgtgtatgcatgtgcacgtgtggctatgtgtgtgactgcatgc

SEQ ID NO: 22707 - DNA, 2853 bp, Homo Sapiens
cggatcatttaggtgacactatagaatacggatccgtcgacggccattaccaatcgcgaaaccgctcgcgcgcgtgcatcccgcaccatcccccggccccgggccctggccggcgtcagaccgagctgccgccgccaccaccgcagcagcagcagtcggggagccaggcccagccagggccgcgggaggcgggggcgcccgggccctggatgtcccgcagcgcggcggccagcggcggaccccggaggcctgagcggcacctgcccccagccccctgtggggccccggggcccccagaaacctgcaggacggagccagacggggcgggcaccatgaacaagttacggcagagcctgcggcggaggaagccagcctacgtgcccgaggcgtcgcgcccgcaccagtggcaggcagacgaggacgcggtgcggaagggcacgtgcagcttcccggtcaggtacctgggtcacgtggaggtagaggagtcccggggaatgcacgtgtgtgaagatgcggtgaagaagctgaaggcgatgggccgaaagtccgtgaagtctgtcctgtgggtgtcagccgatgggctccgagtggtggacgacaaaaccaaggatcttctggtcgaccagaccatcgaaaaggtctccttttgtgctcctgaccgcaacctggacaaggctttctcctatatctgtcgtgacgggactacccgccgctggatctgccactgttttctggcactgaaggactccggcgagaggctgagccacgctgtgggctgtgcttttgccgcctgcctggagcgaaaacagcgacgggagaaggaatgtggggtcacggccgccttcgatgccagccgcaccagcttcgcccgcgagggctccttccgcctgtctgggggtgggcggcctgctgagcgagaggccccggacaagaagaaagcagaggcagcagctgcccccactgtggctcctggccctgcccagcctgggcacgtgtccccgacaccagccaccacatcccctggtgagaagggtgaggcaggcacccctgtggctgcaggcaccactgcggccgccatcccccggcgccatgcacccctggagcagctggttcgccagggctccttccgtgggttcccagcactcagccagaagaactcgcctttcaaacggcagctgagcctacggctgaatgagctgccatccacgctgcagcgccgcactgacttccaggtgaagggcacagtgcctgagatggagcctcctggtgccggcgacagtgacagcatcaacgctctgtgcacacagatcagttcatcttttgccagtgctggagcgccagcaccagggccaccacctgccacaacagggacttctgcctggggtgagccctccgtgccccctgcagctgccttccagcctgggcacaagcggacaccttcagaggctgagcgatggctggaggaggtgtcacaggtggccaaggcccagcagcagcagcagcagcaacagcaacagcagcagcagcagcagcagcaacagcagcaagcagcctcagtggccccagtgcccaccatgcctcctgccctgcagcctttccccgcccccgtggggccctttgacgctgcacctgcccaagtggccgtgttcctgccacccccacacatgcagcccccttttgtgcccgcctacccgggcttgggctacccaccgatgccccgggtgcccgtggtgggcatcacaccctcacagatggtggcaaacgccttctgctcagccgcccagctccagcctcagcctgccactctgcttgggaaagctggggccttcccgccccctgccatacccagtgcccctgggagccaggcccgccctcgccccaatggggccccctggccccctgagccagcgcctgccccagctccagagttggacccctttgaggcccagtgggcggcattagaaggcaaagccactgtagagaaaccctccaaccccttttctggtgacctgcaaaagacattcgagattgaactgtagtccgagccgccccacccactccatcatctccaggtgccccacgcctgggggtggaggcacaacctctcccctaaccctgctccctggggctgcgcccctcaacaccctctcaacacccccctccctcaaccaccccgacaaccactacagaaccaacattgtgacgcccaggttgcaacaggatggaattcagggacggacccagcctggctaagggaaccatttcactgccggacttaggctggcaatgcccccttccccaaccccagacacaggggttggccacaatcccactgaatgcccttggttcacactccatttcccagtttctgttgacccccaccttccagtgttggacaggatggaggggggacacttgcttaggggctctcctgggccccacaccagtgcccaccccaaatctggtcgtctcctccccccatgcacagcacaagctaagggctgccctctgaccacacgctgcgttcactgccaatgctgtactcacctccatcaccctccaactttggggcccatgtcttccttgggccaaggtctcatgggggctagcgccaagttgggggcccaggaggcggggagggaggaggaggagaagatgcgcagttacctcatgtcggtgcccgctggggaggggtccgggaagaaggggaaggggtgcctggcgggtacttttctatcttttatttccagattttttttgtatctaaacttgaagatttgtattatacaaggacagccaataaaggaagaatataaaaaaaaaaaaaaaaaaaaaaaaaaaaaaacaaaaaaa

SEQ ID NO: 22708 - DNA, 2776 bp, Homo Sapiens
ggaaaacgacacctagaagtaggagtgagattcgctgaagttcccttctgaggaagacccacccctccgcctggagagccggggctggcggtgcctgaggaccccttcggcctggacagcccacgcgggcttggggggcctcgctctgccctcatggggcggccatcggttcccgaagcggcgagtgaaaattcaaatggccagtagggggcgcactcggaagtggccgccccgcatgaggcagttcagcggccccgagagtccggggagggaggtttattctccgcctgcacgagactgtgaaatccgcaaccatgagcaggagaggcggccctggtggggaagaggccaccaacatctggacggcaggtacccagagagtgagcagctccacgcgggactgtgcacggtggccgacacccgcagggacgcccgccggacgagcacgcggagggccctcgcctccacggatgcaccatgccggtgtgaggagcatctgttcttcccactctctgcagttaacaaacccaacccaaaccaccacaggtgctcctcctggggagtttcctgtctgacaaatgccaggctcacttcaaggagaatcacgcttctttctaaagatggattcaccatttaaaacagagctctgggagcctttcggcaaatcttgaaagctgcacggcgcagagacatggatgtgacttcccaagcccggggcgtgggcctggagatgtacccaggcaccgcgcagcctgcggcccccaacaccacctcccccgagctcaacctgtcccacccgctcctgggcaccgccctggccaatgggacaggtgagctctcggagcaccagcagtacgtgatcggcctgttcctctcgtgcctctacaccatcttcctcttccccatcggctttgtgggcaacatcctgatcctggtggtgaacatcagcttccgcgagaagatgaccatccccgacctgtacttcatcaacctggcggtggcggacctcatcctggtggccgactccctcattgaggtgttcaacctgcacgagcggtactacgacatcgccgtcctgtgcaccttcatgtcgctcttcctgcaggtcaacatgtacagcagcgtcttcttcctcacctggatgagcttcgaccgctacatcgccctggccagggccatgcgctgcagcctgttccgcaccaagcaccacgcccggctgagctgtggcctcatctggatggcatccgtgtcagccacgctggtgcccttcaccgccgtgcacctgcagcacaccgacgaggcctgcttctgtttcgcggatgtccgggaggtgcagtggctcgaggtcacgctgggcttcatcgtgcccttcgccatcatcggcctgtgctactccctcattgtccgggtgctggtcagggcgcaccggcaccgtgggctgcggccccggcggcagaaggcgctccgcatgatcctcgcggtggtgctggtcttcttcgtctgctggctgccggagaacgtcttcatcagcgtgcacctcctgcagcggacgcagcctggggccgctccctgcaagcagtctttccgccatgcccaccccctcacgggccacattgtcaacctcgccgccttctccaacagctgcctaaaccccctcatctacagctttctcggggagaccttcagggacaagctgaggctgtacattgagcagaaaacaaatttgccggccctgaaccgcttctgtcacgctgccctgaaggccgtcattccagacagcaccgagcagtcggatgtgaggttcagcagtgccgtgtagacagccttggccgcataggcccagccagggtgtgactcgggagctgcacacacctgggtggacacaaggcacggccacgtcatgtctctaaactgcggtcagatgtggcttctggctcctcggggcctcgcgagggtcacgcttgcctggtcaccctggggctgcttaggaaacctcacgactggtcaccttgcactcttcacacagaattgctacaatcccaaagcgctcgccccgcagggtccaaaggccagcggtgaccagcctgtcacccagctcctccccgccaaccctgcctgccgctgcacctgcctgccgctgcaggaaacatttgacaccgtcgaccaggaaagccacacggagaggccactgtgggtgaagcgcctcagttacacaggaaccctaaagcaaatctgccaccgtgggggaactgacgctggagatgcaaggtgctggtgggtctgagctggacgtcgcggtgtgtcctctgtgcccacggtctgagctagctagcgcaccgccgagttaaagaggagaaggaaaacatgctgctctggtgcacgcctgagcgtcctccatcttccaggatggcagcaatggcgctgtgcggcctcaccaggcccacgaggagcagcagcgctcggcccggagcagcaggaaggcccctctgtggagcgcccgccgtctgctccggggtggttcagtcactgcttgttgacatcaacatggcaattgcactcatgtggactgggaccgtgcgagctgccgtgtgggttagtcgggtgccaggacaatgaaatactccagcacgtgtggctgacgaatttgtttctacagaaataacagctggggacaactgcggtgatgatgtaaaaaccttcccataaaatgtaagaaaagctgatgaggctggtgacgttcagcctttgtcaataaacctgtcatgtgcggatcctt

SEQ ID NO: 22709 - DNA, 4598 bp, Homo Sapiens
gagccggagcccagtgacaggcgacggcctcttgccgccccggaccccgggcgcttacctgtggctgctggggtcggccgcccgggaccaggctgggagccccgagaaacgcttcgttaagggactcaggcagtacgggaagaacttcttcagaattagaaaggagctgcttcccaataaggaaacaggggagctgatcaccttctattactattggaagaagacccccgaagcagccagctcccgagcccatcgtaggcaccgcaggcaggccgtgttcaggaggattaagactcgcaccgcgtccacacccgtcaacacaccctccagacccccgtccagtgaattcttggacctaagttcagccagtgaagatgacttcgacagtgaggacagtgagcaggagtgaaggggtacgcctgccgccactgcttcaccaccacctccaaagattggcaccacggaggccgggagaacatcctgctttgcaccgactgtcgcatccacttcaagaaatacggtgagctcccgcccattgagaagcccgtggacccgccaccgtttatgttcaaacccgtcaaggaagaggatgatgggctcagtgggaagcatagcatgaggacacggcggagtcggggctcgatgtcgacactacgcagtggtggaagaagcagccagccagccctggatggtcgcacctcacccatcaatgaagacatccgctccagcggccggaactcccccagcgctgccagtacctccagcaatgacagtaaagcagagacagtgaagaagtcggccaagaaggtgaaggaggaagcttcttcccttcttaagagtaacaaacgccagcgggagaaggtggcctctgatacggaggaggctgacaggaccagctccaagaagacaaaaacgcaggagatcagcaggcccaactcgccatctgaaggtgagggagagagttcagacagtcgcagcgtcaacgatgagggtagcagtgaccccaaagacatcgaccaggacaatcgcagcacgtccccgagcatccccagcccccaggacaatgagagtgactcggactcgtcagcccagcagcagatgctgcaggcccagcccccagccttgcaggctcccactggggtcaccccagctccctcctcagctcctccagggacccctcagctgcccacgccagggcccacgccctctgccactgcagttcccccacagggctcccccacggcctcccaggcccctaaccagccacaggctcccacagcgcctgttccccacacccacatccaacaggcaccggccttgcacccccagcggccgccctcaccgcatcccccgccgcatccctcgccacatcccccactgcagcctctgactgggtcggcgggccagccttctgcaccctctcatgcccagcccccactgcacggtcagggcccacccggccctcacagcctgcaggctgggcccctgctgcagcacccaggccccccacagccctttggcctccctccccaggcctcccaaggccaggcccctctggggacctccccagcagcagcgtaccctcacacctccctgcagctgccagcctctcagtcagcgctgcagtcccaacagcctccacgggagcagcccctgccaccagcgcccttggccatgccccacatcaagcccccgcctaccactcccatcccccagctgccggcgccacaggcccacaagcaccctccccacctctcggggccctcacccttctccatgaatgccaacctgcctccccctccagccctgaagcccctgagctccctgtccacacatcaccccccgtcggctcaccccccacccctgcaactcatgcctcagagccagccattgccctcctcgcccgcccagccccccgggctgacccagagccagaacctgcccccgccccctgcctcccacccccctacaggcctccaccaggtggccccccaacccccgtttgctcagcacccctttgtccctggaggccctcctcccatcacccctccgacctgcccctccacctctaccccaccggcgggacctggcacctcggcccagccaccctgctctggtgcggcggcttcaggaggcagcatagcgggggggtcgtcctgcccactccccaccgtccagatcaaggaggaggctctggacgacgctgaggagcctgagagcccccctcccccaccaaggagcccgtccccggagcccactgtggtggacacccccagtcacgccagccagtcagctaggttctacaaacacctggaccggggctacaactcgtgtgcccggacagacctgtacttcatgcctctggccgggtccaagctggccaagaagagggaggaggccattgagaaggccaagcgcgaggctgagcagaaagcccgagaggagcgagagcgggagaaggagaaggagaaggagcgggagcgggagcgagagcgggagcgcgaggcagagcgggcggctaaggcgtccagctcagcgcatgaaggtcgcctcagtgacccacagctcagtggtcctggccacatgcggccatccttcgagccaccaccaaccaccattgctgctgtgcccccctacatcgggcccgacacacctgcccttcggactctgagcgagtacgcccggccccacgtcatgtcgcccaccaaccgcaaccaccccttctacatgccccttaaccccacggaccccctgctggcctaccacatgcctggcctctacaacgtcgaccccaccatccgcgagcgggagctccgggagcgggagatccgagagcgggagatccgagagcgggagctgcgggagaggatgaagccgggcttcgaggtgaagcccccagagctggaccccctgcacccagccgccaaccccatggagcactttgcccggcacagcgccctcaccatccccccgaccgccgggccccacccttttgcttctttccacccgggcctgaaccccttggagagggagagactggccctggcgggcccccagctgcggcccgagatgagctaccctgacagactggcagccgagcgtatccacgcagagcgcatggcatcgctgaccagcgatcccctggcccgactgcagatgttcaacgtgactccgcaccatcaccagcactctcacattcactcccacctccacctccaccagcaggaccccctccaccaaggttcagcaggccccgttcacccgctggtcgaccccctgactgccggtccccacctggctcgcttcccctacccgcctggcactctccccaaccctctgcttggacagcccccacacgagcacgagatgcttcgccacccagttttcggcaccccctacccccgtgacctgcctggggccatcccaccccccatgtcagcagcccaccagctgcaggccatgcatgcccagtcggccgagctgcagagactggccatggagcagcagtggctgcatggacacccccacatgcatggtggccacctaccaagtcaggaagattattacagtcgactgaagaaagaaggtgacaagcagttataagttatttatttgttaacgctggctgtggaaaccccagttcttggggggagaaacaggactttttacataaaataggagctgcaaaagcaaaaagaatatcttctaaagattctttatatatttaaaaacccacaactaaaaatgtatccacatagtagtgttcgtttgtcgagaggatttcctgagactggtttggatctccctgcatgacagtcccccagaaacttagtgagtcctggactggactgaacatccagaaagcttccctgcaatcttggggtttggctttagttttcttttccttgatttctcagtaggtgctagaatccagttcacacccttcactgtgcgtgcagacacactgacacactccgccacgagtgctccagagcccacgaggcttgcagatcgggggcataggaatttggaatccaagagctataatttttaaaaaaaaaaaaatcttttattttaatacattgtaggaaatcttcataattggagaaagttctgcagcatggctttttacgtctgtaaataaataattttagaacagcctttttttcttccataaactactattgtgatctattttttccagccatgtcactaattgtgaattcctaccaactattgacagaatacagagttgattttttaataaaaagttatatataattatccctttaattaaagggagcaaaggggcgttccacatggacagaggcttggaccgaggcctggtcacagcagcgagcatccagggtttgcagggacgatgttacagactctgttttctgcctggcgtttcacttgtgtctgctcctagcctgtgctctgccagcagcacagacatctgctccatcagacctcttccattttgcacagggagtgcaggaggtgaatgttcactttctgttctccagtgtcactgttctgtttccacgggatggaaagcgcatgggcctgtgtccattgtagatttccttctagat

SEQ ID NO: 22710 - DNA, 9700 bp, Homo Sapiens
ttacaggcccattataaggagtttttatgtccataaattattatgacataaattggagggctttaaattaggggagtgaagtggtctgatttgtaattttaaatgatcgcgtcagcagttgttttatggtataaaatgcccagctttaagatgaccatgcattctacaaattcaccgtgacatcactgccaaaactcttaacctgtcttaatctagttttcctgacagataaataggtcggaataaagctccatgacataactagtgggagccaaagatttgaatcacgtcttggtttcaaaacttgctacccacaaatgagttgtgagctcttgtcaggttatttactgtatttgtgcctcaactatctcagctgtgaaatggggataatgaaagttcctacatcatttatttgtggaaaaaaaaatgacatgtaaagcacgacgagagcgcctggcacaatgtagtaagctttcacaaacactcactttcattccttcttgcaggggattactgagaggatccacaagataatgcacgtgaaagggcttgcgaaattgtaaggactatcttaatggtagagtcctctttatgttttcttttaaacggtccagaggacgctgggctgttcgaggagaggcgcgaggccaagcgcagcctcaatgcggtcattgtcgtggggccgcccctcccccgcccggggcgcttctccatggcaacgtgggctttacctctccccgcctcctcaggcccgcagaccggaagcagcccgcgccgggggtttctgggaaaaggcttgtgaacggcgtttctgcgtctgccgtggacagcgaagctgctgcggttcctgagccggaggtttgcgccggtgtgcggggaacgttatgagagggaggggggacaccgggctagggtctgcggacctcttagcaggagccggcggggaagcctgtccgggaccttcctcagcttcccgggaggcgcggggaacaggccgcggtctccgcgcctagcagttgtggggcggggaggggtaggcggcaggcctgcttgggtcttcggcatttgcagagagctctctaaccccctgtgtcctccgagaccctcaccttccccctcccccaccggccggttttgttctatttcgaggccctggcgtctcgcggagggttctgggagtcgtgatgggagggggtggtagtgggacgagacttgcgcggggcttctgggatttgtagtctcaccggccgcaggcggaagtgccgtggttccgacgctgttgtcacagggtggcctttggtcatctgaaatccgcggtcctgagtgctgggaagaggggctagaggacgtcgggccggggccggggctggggccgggatacacagcaggtctatgcagcagtaaggtgggcgatccacctgggacgaggtaccctgcccaaacattgtcgggaccgtgggccttccctccatttcccacaagcggtatgctctacagcataaaaggaagagaaaattatgtagaaatacttgcaccgttgataagcagggtcttggaataggaacgaatgaatgttggctagaccttatgtataaggccaccacactccagggtatttaattaaaccagtatgtattacttgtctgataaggccttttctgattctagtcttcatcttgcttgggttacaataagtttttttaagttgttattgttcagattttgggccctgaataaataaataggctgaatggctcattgctagtatgtgtcgtaaacaacagcacgggcatgatcgtgcaaataataaaggtccagaagcagtatacagtttccctgaaggtagaagctggggaaactgtgagtcctccagtgtaaggacaagacactggaccactgcaggaagtcaaggtgcttatgcgagtgccttttcttaatagaagtttctgtgattaatgcctatcattataaatataaatgtacgtatggtgtggtggaagactgaatatttacgtattatgtgcaagataatttttcaaaattatgtgatgtttttcacatatgatcttttcaatattatgtgatctgctactcagcaagtgaacattttttcacatataagtccaaggagttcttaaacaccttaaaaatattttttaaatggtaaagaaaatttttttaagcacataataataaagcgaaccttccttttgagttgacttgtgtgtgtcaggaaacaccaatcctgaattggaaataatgcgttccagggtcaggcacatttagaaagcactgaagtagtctggttcttacttggattcttttgattattgacatagggtttgtcgtcttagtaggtcatgattggcaaactttttctgtaagcggccatatagtaaataaggtcatgcataactcaacgatagtgctatggtctgagaaatgtgttaggctatttcatccttgtgtgaacgtcatagaatgtacttgcacaaacctaaatggcgtagcctactacacacttaggctatctggtatagcctattgcgcctaggctacaaaccggtacggcatgttgctgtactgaatactgtagagaattgtaacacaatgctaactatttgtgtatcaaaacatagaaaagataagagtaaaatatgatataaaatgtttgaaaaaaaaaaaagatatgcctgtacagggcacttaccatgaatggacctcgctggattggaagttgctctaagaagtcagtgagtgagtggtgaatttggaggcctgggacattactgtacattcctatagaccatataaacactgaacacttaggctacactaaatttattaagaaaacatttttcttcaataattaaccttagcttactggaactttttcacttacaaacttttacatttttttttaacttttttactcttttgtgataacacttcacttaaaatacaaacacattgtacagctgtacaaatatatttatatccttattctgtaagctttttgcttttttttttttatagacagagtctcgctctgtcgccaggctagagtgcagtggcgcgatcttggctcactgcagcctccacctcgcgggttcaagagattctcctgcctcaatctccccagtagctgggactacaggcgcaatccaccacgcccagctaatttttgtatttttagtagagacagggtttcaccatgttggccaggatggtcttgatctcttgacctcgtgatctgcctgcctcagcctcccaaagtgctgggattacaggcctgagccaccgtgcccggcacagctttttgctatttttaaattcattttttagagacagggtcatactctgttgcccaggctggaatgcagtggtgtgatcatagctcagtggagccttgaactcctggtctttagtgatcctcctgcctcagcctcctatagtgctgggattacaggtgtgaaccattgcacctggccaattttttttttcttttggaactgtttttgttaaaagctaagataaacacattagcttaggcttacacagggtctggattatcagtatcattgccttctacctccatatcttgtcccactggaaggttttcaggagcagtaacatacatggagctgtcatctccataataacagtgccttctgtaatacctcctgaaggacctgcctgaggccattttgcagttaacttttttatttagtaagtagaaggagcacactctaaaataatatagtataaaaagtatagtaaatacataaaccagtaacatagtcgtttattattgttatcaagttttatgtaccatacataactgtatgtgttaaactggcaacacagcaggtttgtttacaccagcatcaccacaaacatgtgagtaatgtattgaccttacaacagctacagtgtcactaggtgaatcttgaatttttcagctccattataatcttatgggagcactgtcatctatgtggtccttcattgacccaaacatcattttgtagtgcatgactgtgttgggtttttttaggccatctagtctgttgaaactactcaactctgctattgtagcgtgaagtatgagtaagtacaattatttatggacacagtcatgttaatttcatatcattttcacgtgtcatgaggtattcatttgattttggggagctccattccctaaatatcattaggtattcatttgattttagggatctccgctccgtaaggcactgtgatgaagaccacagccatttaaaaatgtgaaaattattgttggtgcaagtgttgtacagaaatgggtggcaggctagatttggccgtgaagctgtagtttgccaattcctggtgtaggttattgattggaatttttaactcaaagaacaagtatcttttacttttaccagtataagttcaaattcttaggatatttttgcttatttatatatcttttatttcttatgcctcaggagtgcctgtgaagaaaacggggtattgccctgaggcttatattctgcttcagttgtcttttcttgaaatattataaatcagaatgtctgcacagtcagtggaagaagattcaatacttatcatcccaactccagatgaagaggaaaaaattctgagagtgaagttggaggaggatcctgatggcgaagagggatcaagtatcccctggaaccatctcccagacccagagattttccgacagcgattcaggcagtttggataccaggattcacctgggccccgtgaggctgtgagccagctccgagaactttgccgtctgtggctcaggccagagacgcacacaaaagaacaaatcttggagctggtagtgctggagcagtttgttgccatcctacccaaagagctacagacttgggttcgagatcatcatccagagaatggagaggaggcagtgacagtgctggaggatttggagagtgaacttgatgaccctggacaaccggtgagcctgcttgtgtcatttcctgtgtcagaagcactggcataggtagtaggcaaagctgctgaattaattccactcaactaagttagaattatgtttatgccttttcccccattcccctaccactccttgttatctgtgccgctttgccatctaggcttctgcagtatttgtttcatggggtttctcttacgtgtttttagttctgattctcattacagttccttctctgaatcaaatctttctgtttccaggtttctctccgtcgacgaaaacgggaagtactagtagaagacatggtatctcaagaagaagctcagggattaccaagttctgagcttgatgctgtggagaaccagctcaagtgggcatcctgggagctccattccctaaggcactgtggtgaggaccagaactctgtgtgggctagagggtgaaagagagtataggccttttgttcagaactttgcttgttctcactggtggggggatcatatcactcttaatctaatatctcagtttttttctgattaagttgattttgctggcctcagaccttttattcctagacattaacatcttcagccttttcttccctttcagtctccttcctaaaaagagttgcccatgtcaggctagcatttgccttactttgagccagcacccacccatggaccaagtccctctattttgcattcagtattacttgtcatctgttttacatccttttactttcaatctcctgcctaattccattggtacagtaagcttacctgaaaacctcttctaatctctttgttgtatatcactgaaatctttctaaatatttatttctgatttccttcaacgtctacctagagtcattttcttctaagaagcttcttttgtagaaatatttggagtaatttttttcctttttctaagtatttatgcaaaaaaagcctccttagctataacatgctttaaatgcagaaaaagcttttttaaaagctcaaagttgtattaattcacgagaccagtctttcccaatatattagccattaacaccatatacttatgtgtatcctttgatatggcccagtatattcctaaaactgctagattgctttctcatgtttatgtgaactaaaatgaaattttgtttgactctgctttagtaatcattccttgaagtagttggagatggtgctggtatgccactgaatgaggtctgagcaggttttcttcacatctgaggggacagtgccagccagtcaacttttggggtggggctgaagtctgctgaaaatctgcagttttacatgtttcatgggacattcttctgtgcaataaagtttgagaagtatcattcttgatatatggggctgatattttcaacttctcatcatctgaattttagagtgacttttcacctgcgttccttatttcagctgtctagtctcttccacacttgggaatttctgtttcctgtgtgccgtttgtctccacttaatcttcacgctcctctgtttttcaagtctccaagcctcactatcctcctctaacctttcagtctgtctctcttagccttatctcctgacttgatctttttgttaattatttactgttttcctcttcgctgaaggcagttgctaaccctatatgaactggatctttactccttaaggcatgaagttttagaaaagtcttaaatgacacttgctgttatctctgcctgcgtgtgagtgatgctaacccatgttggtaattcaggcttttctttcattggacacgtttcactgaggcttagaaataaccatttttctaagtaccatgacaaataccacatgggagaagctgcttttattggaaaactttcatttattaggggcatactgaatttttatgtcatgtctttggttaacacaggaggcccccagcttatcttcagccccttcttgtcaagactcctgtgttctgcttttaggctaacattggctgtgacctgacttggcttgttcatttcagaaatagccactttctgacatgtttttctaatttacatctttgtattttgatgtaatttctccctttctcaaagtaaaagaacattataatgatttcctagtggccaattttattttatttttattcttacaaagtttcatccatacctagccacatcattttgactatctccctaaccatcttagaatctaccatctttctgacctttgttttctgactaccatttgtaaaccacttgcctatgttttattcagatatcccttatatcatgatgttatactgttattcagagtaatttcattttttcttttttgagaataggccttaacaccagtgtcagagtggtttatagatgtgtgctagctattttagttcattaaaaaaaaaattttttttaggtttctttttcccttaatagataatgaatgatatttacattttctgtttatttcagatgatgatggtaggactgaaaatggagcactagctccaaagcaggagcttccttcagcattagaatcccatgaagttcctggcactctcagtatgggtgttcctcaaatttttaaatatggagaaacctgtttccccaagggcaggtttgaaagaaagagaaatccctctcgaaagaaacaacatatatgtgatgaatgtggaaaacacttcagtcagggctcagcccttattcttcatcaaagaattcacagtggggagaaaccttatggatgtgttgagtgtgggaaagcattcagccgaagttccattcttgtgcaacaccagagagtccacactggagaaaaaccttacaaatgtcttgaatgtgggaaagcctttagccagaattcggggcttattaatcatcagagaatccatactggggagaaaccttatgaatgcgttcagtgtgggaaatcgtatagtcaaagctcaaatctttttagacatcagagaagacacaatgcagaaaaacttctgaatgttgtgaaagtttaagaaattgaaaaaaaaaaaagaatcagcactcaggtctttttcttcagaaatgaagacaaaatttaaaatatgaaatgatgcagaatagttttttccctattgactgtcagaaaatccactgggaaatgtaaaaatcttcactcaccattatgatatttatcttgaaagaaatggtgtcatacctgcctagaaactgaaattttaaacttaattcaggtcttaatgcctaaattttccatgtgatgtttatagtctgtattacttctccaaataatgaactacctgattcattgtccctttcttgaaagtttcttttttaagacaaatacattatttctgcattgatcattgaaatgttctttatatggatacattcccttatatattaaaaggcaacaggaattacaaagtctgaaaaccattttaaaccatcttttaaaaatttacccttatttccttttacctaatttgaatatgcatttgagaaaataagaggataaaggatggctaagagcctcaaaatgaaccataagatctcagataagaagtgatggtgataaaacatcaaaaagtgaatggaacaccttgattggggaagataagcaaatactttgatctaagaattgaaatgtatcaagaatttatattttgcctgcaggaaaattcaaaagctactcatcctctctataatttggagtcatcttactaatgaaaataatgttttcccatatattattaaaaagcatacagtctaaataataaacagttgtaaaataatgaaggtagaaattataacactagggaaaaatttgtagcggatggcagtgttgaaggcaaatgtaaacataagggtaatggtctgtcatggcttttagaaaaagatgatagagttcatcattattttgccttcatctttgttaaggacagaaaattccctgacaggtgggcaagtatcaggttacctattttttattcctttggtacaaaagggttgaacgtcaggctaaaaaagcagccatgcatttattattaaacattttctaccgacaaggcactgtgctaggtactgtaatcctaccataagtaggtaggtatttcttccactgtaaatcataggggtttgctgttttatgtgagttagcctcttccccttgtctgagcattcctcaggggaggtcacctgtgaggttcccagaactgtagttttttttaccagggtgttgtatttggagggggaggaggactcggctcaaaagagctagctggctctccagtgttcagaggtgagtccacgatactcttaccacaatttggaagtttgtgaatctttttaaagaactaatcaatctctaatagcattgaggttgtacctacatattaagttgaatggactgttctatttaaaaaataaacaactagacaattaactagtttattaacctatcacaattgaatttttttttaattttcagtcttaacacattttttaaaatgtattaaagtaatacattgtagtagtaggattatatactccttggctgagaattccaagtactgtggttctactgttgagtggaaaactctggaagttaaaatatagaatatgagaggaggcttttttataatgggcatcattgtgtggaaaatgacccatgtgaatacaaatatttcctagttcagagattttggttatatctggtgctt

SEQ ID NO: 22711 - DNA, 3993 bp, Homo Sapiens
ggcacgagcggagaaccccgcaatctctgcgcccacaaaatacaccgacgatgcccgatctactttaagggctgaaacccacgggcctgagagactataagagcgttccctaccgccatggaacaacggggacagaacgccccggccgcttcgggggcccggaaaaggcacggcccaggacccagggaggcgcggggagccaggcctgggctccgggtccccaagacccttgtgctcgttgtcgccgcggtcctgctgttggtctcagctgagtctgctctgatcacccaacaagacctagctccccagcagagagtggccccacaacaaaagaggtccagcccctcagagggattgtgtccacctggacaccatatctcagaagacggtagagattgcatctcctgcaaatatggacaggactatagcactcactggaatgacctccttttctgcttgcgctgcaccaggtgtgattcaggtgaagtggagctaagtccctgcaccacgaccagaaacacagtgtgtcagtgcgaagaaggcaccttccgggaagaagattctcctgagatgtgccggaagtgccgcacagggtgtcccagagggatggtcaaggtcggtgattgtacaccctggagtgacatcgaatgtgtccacaaagaatcaggtacaaagcacagtggggaagccccagctgtggaggagacggtgacctccagcccagggactcctgcctctccctgttctctctcaggcatcatcataggagtcacagttgcagccgtagtcttgattgtggctgtgtttgtttgcaagtctttactgtggaagaaagtccttccttacctgaaaggcatctgctcaggtggtggtggggaccctgagcgtgtggacagaagctcacaacgacctggggctgaggacaatgtcctcaatgagatcgtgagtatcttgcagcccacccaggtccctgagcaggaaatggaagtccaggagccagcagagccaacaggtgtcaacatgttgtcccccggggagtcagagcatctgctggaaccggcagaagctgaaaggtctcagaggaggaggctgctggttccagcaaatgaaggtgatcccactgagactctgagacagtgcttcgatgactttgcagacttggtgccctttgactcctgggagccgctcatgaggaagttgggcctcatggacaatgagataaaggtggctaaagctgaggcagcgggccacagggacaccttgtacacgatgctgataaagtgggtcaacaaaaccgggcgagatgcctctgtccacaccctgctggatgccttggagacgctgggagagagacttgccaagcagaagattgaggaccacttgttgagctctggaaagttcatgtatctagaaggtaatgcagactctgccatgtcctaagtgtgattctcttcaggaagtcagaccttccctggtttaccttttttctggaaaaagcccaactggactccagtcagtaggaaagtgccacaattgtcacatgaccggtactggaagaaactctcccatccaacatcacccagtggatggaacatcctgtaacttttcactgcacttggcattatttttataagctgaatgtgataataaggacactatggaaatgtctggatcattccgtttgtgcgtactttgagatttggtttgggatgtcattgttttcacagcacttttttatcctaatgtaaatgctttatttatttatttgggctacattgtaagatccatctacacagtcgttgtccgacttcacttgatactatatgatatgaaccttttttgggtggggggtgcggggcagttcactctgtctcccaggctggagtgcaatggtgcaatcttggctcactatagccttgacctctcaggctcaagcgattctcccacctcagccatccaaatagctgggaccacaggtgtgcaccaccacgcccggctaattttttgtattttgtctagatataggggctctctatgttgctcagggtggtctcgaattcctggactcaagcagtctgcccacctcagactcccaaagcggtggaattagaggcgtgagccccatgcttggccttacctttctacttttataattctgtatgttattattttatgaacatgaagaaactttagtaaatgtacttgtttacatagttatgtgaatagattagataaacataaaaggaggagacatacaatgggggaagaagaagaagtcccctgtaagatgtcactgtctgggttccagccctccctcagatgtactttggcttcaatgattggcaacttctacaggggccagtcttttgaactggacaaccttacaagtatatgagtattatttataggtagttgtttacatatgagtcgggaccaaagagaactggatccacgtgaagtcctgtgtgtggctggtccctacctgggcagtctcatttgcacccatagcccccatctatggacaggctgggacagaggcagatgggttagatcacacataacaatagggtctatgtcatatcccaagtgaacttgagccctgtttgggctcaggagatagaagacaaaatctgtctcccacgtctgccatggcatcaagggggaagagtagatggtgcttgagaatggtgtgaaatggttgccatctcaggagtagatggcccggctcacttctggttatctgtcaccctgagcccatgagctgccttttagggtacagattgcctacttgaggaccttggccgctctgtaagcatctgactcatctcagaaatgtcaattcttaaacactgtggcaacaggacctagaatggctgacgcattaaggttttcttcttgtgtcctgttctattattgttttaagacctcagtaaccatttcagcctctttccagcaaacccttctccatagtatwtcagtcatggaaggrtcatttatgcaggtagtcattccaggagtttttggtcttttctgtctcaaggcattgtgtgttttgttccgggactggtttgggtgggacaaagttagaattgcctgaagatcacacattcagactgttgtgtctgtggagttttaggagtggggggtgacctttctggtctttgcacttccatcctctcccacttccatctggcatcccacgcgttgtcccctgcacttctggaaggcacagggtgctgctgcctcctggtctttgcctttgctgggccttctgtgcaggacgctcagcctcagggctcagaaggtgccagtccggtcccaggtcccttgtcccttccacagaggccttcctagaagatgcatctagagtgtcagccttatcagtgtttaagatttgtcttttatttttaatttttttgagacagaatctcactctctcgcccaggctggagtgcaacggtacgatcttggctcagtgcaacctccgcctcctgggttcaagcgattctcgtgcctcagcctccggagtagctgggattgcaggcacccgccaccacgcctggctaatttttgtatttttagtagagacggggtttcaccatgttggtcaggctggtctcgaactcctgacctcaggtgatccaccttggcctccgaaagtgctgggattacaggcgtgagccaccagccaggccaagctattcttttaaagtaagcttcctgacgacatgaaataattgggggttttgttgtttagttacattaggctttgctatatccccaggccaaatagcatgtgacacaggacagccatagtatagtgtgtcactcgtggttggtgtcctttcatgcttctgccctgtcaaaggtccctatttgaaatgtgttataatacaaacaaggaagcacattgtgtacaaaatacttatgtatttatgaatccatgaccaaattaaatatgaaaccttatataaaaaaaaaaaaaaaaaaact

SEQ ID NO: 22712 - DNA, 2764 bp, Homo Sapiens
ggagccagtcttgggcgctggagggcctgtcctgaccatggtccctgcctggctgtggctgctttgtgtctccgtcccccaggctctccccaaggcccagcctgcagagctgtctgtggaagttccagaaaactatggtggaaatttccctttatacctgaccaagttgccgctgccccgtgagggggctgaaggccagatcgtgctgtcaggggactcaggcaaggcaactgagggcccatttgctatggatccagattctggcttcctgctggtgaccagggccctggaccgagaggagcaggcagagtaccagctacaggtcaccctggagatgcaggatggacatgtcttgtggggtccacagcctgtgcttgtgcacgtgaaggatgagaatgaccaggtgccccatttctctcaagccatctacagagctcggctgagccggggtaccaggcctggcatccccttcctcttccttgaggcttcagaccgggatgagccaggcacagccaactcggatcttcgattccacatcctgagccaggctccagcccagccttccccagacatgttccagctggagcctcggctgggggctctggccctcagccccaaggggagcaccagccttgaccacgccctggagaggacctaccagctgttggtacaggtcaaggacatgggtgaccaggcctcaggccaccaggccactgccaccgtggaagtctccatcatagagagcacctgggtgtccctagagcctatccacctggcagagaatctcaaagtcctatacccgcaccacatggcccaggtacactggagtgggggtgatgtgcactatcacctggagagccatcccccgggaccctttgaagtgaatgcagagggaaacctctacgtgaccagagagctggacagagaagcccaggctgagtacctgctccaggtgcgggctcagaattcccatggcgaggactatgcggcccctctggagctgcacgtgctggtgatggatgagaatgacaacgtgcctatctgccctccccgtgaccccacagtcagcatccctgagctcagtccaccaggtactgaagtgactagactgtcagcagaggatgcagatgcccccggctcccccaattcccacgttgtgtatcagctcctgagccctgagcctgaggatggggtagaggggagagccttccaggtggaccccacttcaggcagtgtgacgctgggggtgctcccactccgagcaggccagaacatcctgcttctggtgctggccatggacctggcaggcgcagagggtggcttcagcagcacgtgtgaagtcgaagtcgcagtcacagatatcaatgatcacgcccctgagttcatcacttcccagattgggcctataagcctccctgaggatgtggagcccgggactctggtggccatgctaacagccattgatgctgacctcgagcccgccttccgcctcatggattttgccattgagaggggagacacagaagggacttttggcctggattgggagccagactctgggcatgttagactcagactctgcaagaacctcagttatgaggcagctccaagtcatgaggtggtggtggtggtgcagagtgtggcgaagctggtggggccaggcccaggccctggagccaccgccacggtgactgtgctagtggagagagtgatgccaccccccaagttggaccaggagagctacgaggccagtgtccccatcagtgccccagccggctctttcctgctgaccatccagccctccgaccccatcagccgaaccctcaggttctccctagtcaatgactcagagggctggctctgcattgagaaattctccggggaggtgcacaccgcccagtccctgcagggcgcccagcctggggacacctacacggtgcttgtggaggcccaggatacagatgagccgagactgagcgcttctgcacccctggtgatccacttcctaaaggcccctcctgccccagccctgactcttgcccctgtgccctcccaatacctctgcacaccccgccaagaccatggcttgatcgtgagtggacccagcaaggaccccgatctggccagtgggcacggtccctacagcttcacccttggtcccaaccccacggtgcaacgggattggcgcctccagactctcaatggttcccatgcctacctcaccttggccctgcattgggtggagccacgtgaacacataatccccgtggtggtcagccacaatgcccagatgtggcagctcctggttcgagtgatcgtgtgtcgctgcaacgtggaggggcagtgcatgcgcaaggtgggccgcatgaagggcatgcccacgaagctgtcggcagtgggcatccttgtaggcaccctggtagcaataggaatcttcctcatcctcattttcacccactggaccatgtcaaggaagaaggacccggatcaaccagcagacagcgtgcccctgaaggcgactgtctgaatggcccaggcagctctagctgggagcttggcctctggctccatctgagtcccctgggagagagcccagcacccaagatccagcaggggacaggacagagtagaagcccctccatctgccctggggtggaggcaccatcaccatcaccaggcatgtctgcagagcctggacaccaactttatggactgcccatgggagtgctccaaatgtcagggtgtttgcccaataataaagccg

SEQ ID NO: 22713 - DNA, 2344 bp, Homo Sapiens
gtctcaggggctgaagtttgtgaggtgtagtattgagtcctgtttgagctattgttctctttttcctgaaaaatggcactgtcaaagagggagctggatgagctgaaaccatggatagagaagacagtgaagagggtcctgggtttctcagagcctacggtggtcacagcagcattgaactgtgtggggaagggcatggacaagaagaaggcagccgatcatctgaaaccttttcttgatgattctactctccgatttgtggacaaactgtttgaggctgtggaggaaggccgaagctctaggcattccaagtctagcagtgacaggagcagaaaacgagagctaaaggaggtgtttggtgatgactctgagatctctaaagaatcatcaggagtaaagaagcgacgaataccccgttttgaggaggtggaagaagagccagaggtgatccctgggcctccatcagagagccctggcatgctgactaagctccagatcaaacagatgatggaggcagcaacacgacaaatcgaggagaggaaaaaacagctgagcttcattagcccccctacacctcagccaaagactccttcttcctcccaaccagaacgacttcctattggcaacactattcagccctcccaggctgccactttcatgaatgatgccattgagaaggcaaggaaagcagctgaactgcaagctcgaatccaagcccagctggcactgaagccaggactcatcggcaatgccaacatggtgggcctggctaatctccatgccatgggcattgctcccccgaaggtggagttaaaagaccaaacgaaacctacaccactgatcctggatgagcaagggcgcactgtagatgcaacaggcaaggagattgagctgacacaccgcatgcctactctgaaagccaatattcgtgctgtgaagagggaacaattcaagcaacaactaaaggaaaagccatcagaagacatggaatccaataccttttttgacccccgagtctccattgccccttcccagcgccagagacgcacttttaaattccatgacaagggcaaatttgagaagattgctcagcgattacggacaaaggctcaactggagaagctacaggcagagatttcacaagcagctcgaaaaacaggcatccatacttcgactaggcttgccctcattgctcctaagaaggagctaaaggaaggagatattcctgaaattgagtggtgggactcttacataatccccaatggctttgatcttacagaggaaaatcccaagagagaagattattttggaatcacaaatcttgttgaacatccagcccagctcaatcctccagttgacaatgacacaccagttactctgggagtatatcttaccaagaaggaacagaaaaaacttcggagacaaacaaggagggaagcacagaaggaactacaagaaaaagtcaggctgggcctgatgcctcctccagaacccaaagtgagaatttctaatttgatgcgagtattaggaacagaagctgttcaagaccccacgaaggtagaagcccacgtcagagctcagatggcaaaaagacagaaagcgcatgaagaggccaacgctgcccgaaaactcacagcagaacagagaaaggtcaagaaaattaaaaagcttaaagaagacatttcacagggggtacacatatctgtatatagagttcgaaatttgagcaacccagccaagaagttcaagattgaagccaatgctgggcaactgtacctgacaggggtggtggtactgcacaaggatgtcaacgtggtagtagtggaagggggccccaaggcccagaagaaatttaagcgtcttatgctgcatcggataaagtgggatgaacagacatctaacacaaagggagatgatgatgaggagtctgatgaggaagctgtgaagaaaaccaacaaatgtgtactagtctgggagggtacagccaaagaccggagctttggagagatgaagtttaaacagtgtcctacagagaacatggctcgtgagcatttcaaaaagcatggggctgaacactactgggaccttgcgctgagtgaatctgtgttagagtccactgattgagactactgcaagcccttgcctctcctcccttgcctttgtctcttcagtcctctcacttattctatttcccaaccccctcccacttgtttgtgtgatctcagaactgtgccaagcagacactgggacaaagggagaatatcttgctcccctcctgagtcagcctggtgttgccctttattccccttatgtgcatatgattaaagagttatttttaaaaaaa

SEQ ID NO: 22714 - DNA, 18609 bp, Homo Sapiens
ggggcacccctacccactggttagcccacgccatcctgaggacccagctgcacccctaccacagcacctcgggcctaggctgggcggggggctggggaggcagagctgcgaagaggggagatgtggggtggactcccttccctcctcctccccctctccattccaactcccaaattgggggccgggccaggcagctctgattggctggggcacgggcggccggctccccctctccgaggggcagggttcctccctgctctccatcaggacagtataaaaggggcccgggccagtcgtcggagcagacgggagtttctcctcggggtcggagcaggaggcacgcggagtgtgaggccacgcatgagcggacgctaaccccctccccagccacaaagagtctacatgtctagggtctagacatgttcagctttgtggacctccggctcctgctcctcttagcggccaccgccctcctgacgcacggccaagaggaaggccaagtcgagggccaagacgaagacagtaagtcccaaacttttgggagtgcaaggatactctatatcgcgccttgcgcttggtcccgggggccgcggcttaaaacgagacgtggatgatccggagactcgggaatggaagggagatgatgagggctcttcctcggcgccctgagacaggagggagctcaccctggggcgaggttggggttgaacgcgccccgggagcgggaggtgagggtggagcgccccgtgagttggtgcaagagagaatcccgagagcgcaaccggggaagtggggatcagggtgcagagtgaggaaagtacgtcgaagatgggatgggggcgccgagcggggcatttgaagcccaagatgtagaagcaatcaggaaggccgtgggatgattcataaggaaagattgccctctctgcgggctagagtgttgctgggccgtgggggtgctgggcagccgcgggaagggggtgcggagcgtgggcgggtggaggatgagaaactttggcgcggactcggcggggcggggtccttgcgccccctgctgaccgatgctgagcactgcgtctcccggtccaacgcttactggggcaggagccggagcgggaagacccgggttattgctgggtgcggacccccacctctagatctggaaagtaaagccagggatggggcagcccaagcctcttaaagaggtagtcgggccggtgaggtcggccccgccccggccccattgcttagcgttgcccgacacctagtggccgtctggggagccgctagcgcggtgggagtggttagctaacttctggactatttgcggactttttggttctttggctaaaagtgacctggaggcattggctggctttgggggactggggatggccccgagagcgggcttttaagatgtctaggtgctggaggttagggtgtctcctaattttgaggtacatttcaagtcttgggggggcgtcccttccaatcagccgctcccattctcttagccccgcccccgccaccccacatgcccagggaatgggggcgggatgagggatggacctcccttctctcctccctcgccctcctcctgtctctaccacgcaagccactccccacgagcctgccctcccgatggggcccctcctattctccccccgccctccccctctcaccctgtggttttatttcacttggcttcagcgccaatgggctgaggttggagttggaagccaccgcggactaaagctttgtttaaattcctgagaactggaaagagttacagcctccctggccaggcgcctcggcgctgtcacccgcgctgatgaggagcaggcgagcttttaaggatttgaggaaagaagaacggggggaggggcgggaagtgaaaaatccaagtgtgcctcttagacccgggggaaaggtggttaagctgggggttgcagtcactactgacaacgcccctcttccgcctgtcccagtcccaccaatcacctgcgtacagaacggcctcaggtaccatgaccgagacgtgtggaaacccgagccctgccggatctgcgtctgcgacaacggcaaggtgttgtgcgatgacgtgatctgtgacgagaccaagaactgccccggcgccgaagtccccgagggcgagtgctgtcccgtctgccccgacggctcaggtgcggctgcgctcggggcctggggcctggggctggggctgggggtggtcggcgctcgctggccctccgtgctggaggcctctgccgacgggagcagcattagcaaaccttggctctaacgggcgtctcttcgtcccctagagtcacccaccgaccaagaaaccaccggcgtcgaagtaatctcctgccctcgaattttgcccctgcgcggcccgtgactcctcacagtcctcccttctctaacctggcctcttgtttcttctcccccaatcccacagggacccaagggagacactggcccccgaggcccaagggtaagcgttgcactctgggctgtggggggctgcaggtgggcatggctctcggccccacgctcaccccggccccgccctctccccctgcagggacccgcaggcccccctggccgagatggcatccctggacagcctggacttcccggaccccccggaccccccggacctcccggaccccctggcctcggaggagtaagtggagaggccttgtgtgtccactctcccctgttttgtttttgttttttggcagatgacataattttatactttgaaataatttcaaacttacagaaaagttgcaagaatcctacaggaaactctcacatacccttcacagtttgtgacatgtgctttattagtctctgtttatgtatatgtatctttttttttctgaactgtttgagcaagttgctaacatcaggctcttttgcgcctaaatacttaggtgtgtttttcctaaaaacaagagcattctcttaactgacctacacaatgattaaattcactctctaatgtgcagtccgtactcaaagttcaccgatgtcccgataatgtcctttatagattccaccccccaccaccccaatctgggatccagtccaggattatgtattgcatttaatcatcatgtctctagtttccacaaatgtagaacgttcctcagactttctttgtctttagtggcactgggagttttgatgagtccagttgttttgcagactgtccctcaatttgggattgtctcattagattagatgcagggatgcatctttggcaggaatgtcttaaaagcaatgttattcttctcagcacatcacaccaggaagtgcatgatgtcagtttcttccatcctcagtgccgtcttctgcctttcaattcactgtcctcactctgacttctcttgtttgttctagaactttgctccccagctgtcttatggctatgatgagaaatcaaccggaggaatttccgtgcctggccccatggtgagccagcagggggagcatggatgacagaagagagaatgggtatccagaggatgtgggcatacgcggctggtatacacagcttgggaggtccatatcacctttgggacctcagagtccagaaaggatgcaagacgactgggtggtcccaacaggcatgaatgactacatccacatgctttcctacagagggatcaccatgacccccctttcttctccctctatagggtccctctggtcctcgtggtctccctggcccccctggtgcacctgtgagtatccaggacgtcttcatatgcctccttgggctttggtcttttggagggaagactgggatgagggcaggagagatgctcagagatctcttggtaagattggagaaggttgacagggacttgtcttctaacccatctttttccttcttctcaagggtccccaaggcttccaaggtccccctggtgagcctggcgagcctggagcttcagtaagcactctctatacagattcatactccttctacaaacacacagactctcctatagaagaactcccaggcctggggtcttccttacctcttcccttcaatcccagccttccccttctttttttcttatccatattctaaccacctcttctatcttttctagggtcccatgggtccccgaggtcccccaggtccccctggaaagaatggagatgatgtaagtatccccagcaagaagataccatctgaccccatggcctccatgggttgggtcctgcaatttccactccaccacatttgggaacgatactcagaggaaggagggcaagtcctctctgatgcacggactgccctggaacaatgatcttttcgcttagtgagatgattccatgtccccaacaaagtgactgttctcctcaccccagccaccttagagcaatccccaaccccatccctttggggaaattggtgcgcagatggtgaaattaaaatgctggtgacagaagtagacagaaattcctttagaggcactcagatttcaccaaacgaaggtttcactgtagatttaaactgagctctagattcaaagataagattctgggcccccaaacctgacctgcaacaatccaaagaagactgagaccttctccacttttccagcccctaggcggtggtggggaggcagaggcatgatggtcttttctctccctctcagggggaagctggaaaacctggtcgtcctggtgagcgtgggcctcctgggcctcaggtgagcagggggctgtggctgaacctgggcttcactgcacttgggcttcatttaggagctgggtccacagtgatgtgttctaatggcccttccttgtcttcttcatctctctccagggtgctcgaggattgcccggaacagctggcctccctggaatgaagggacacagagtgagtcacctttgagtcatttaagctccccaagtccctagcatacccccatccagtcccagcctcttccccaaaagatcctgagttgcatcatggtgggtggcagctacagaagtcccaagggccagagagtggacatccaaaagcactcctcatggaatcccgattaccgattgggtgagatcttagagccatttggggtttagtctagctcagaaacaaagggatggcggtgatgacctcccaaggctctttctcagatctaggtggatgtcaaggctgttccaccccctccacaggttcttaccttctacctctttcctgctttagggtttcagtggtttggatggtgccaagggagatgctggtcctgctggtcctaaggtaagaggctgtctgaacatcatggtcctccacatccccagagtcccaccatgaatgaatttctcactcattattctctgatctacagggtgagcctggcagccctggtgaaaatggagctcctggtcagatggtgagtgtgcccagttccagagggcagggatggggcaggaggcaggggcaagatggaggcctgggggaacaaggctgtctcccatctcatctgacttctcttggtttggttgtcagggcccccgtggcctgcctggtgagagaggtcgccctggagcccctggccctgctgtaagtactcctggccccttgggggatccctgagctctggaaggggctccccaggaactctagggactggccagtgctcagtggacttaacggggcttcccctctctcctgcagggtgctcgtggaaatgatggtgctactggtgctgccgggccccctgtgagtgtggcctgtaggcctcagggcctgggagtggggaggggtctcagtgtctgctcttggggctgacaatgggggcaggttatgttggtctgaaccccaggacttcctctgtcccagggtgtgacttgcagctgccatctcttccttctcgctgacatctccatttcattcacagggtcccaccggccccgctggtcctcctggcttccctggtgctgttggtgctaaggtgagaccccccactctcctctaagcatgaccctcatgggccaaggggttcatgtctccctgttccccaaaccaaagggacccagagtggcaagagagcagcccgttcactaacacctttgtcctggggtctccgtctctgatcttagagtcctgatcattgctctcctgtccctgtctccccttcctcctgccatcccgagaggcaaggttgggtttcccagggtggcttctgatatgtcctttcttctgattcagggtgaagctggtccccaagggccccgaggctctgaaggtccccagggtgtgcgtggtgagcctggcccccctggccctgctggtgctgctggccctgctgtaagtgtccccgactcagtgtcccctttgccactttctaacctcagagtccttgcctgttgctgacactcctttctctgtgccacagggaaaccctggtgctgatggacagcctggtgctaaaggtgccaatgtaagtatcctgccaggcttcagtcccactcctgccgcctgcagcctgcctgcccctttccctctgctcctaggctcacgccctggctgtctgcctcccacagggtgctcctggtattgctggtgctcctggcttccctggtgcccgaggcccctctggaccccagggccccggcggccctcctggtcccaagggtaacagcgtgagtaccaaactctcccttctgcccaccccatgcactggctccagtgcggctctcatctggggagcaggaagacgcaggccaactgagcgcccccgactctcagctcatcctcttctccccccttgcagggtgaacctggtgctcctggcagcaaaggagacactggtgctaagggagagcctgtaagtctccccgccatccttcttgcagcccagcccaccctgccctaggagccccctgagggaaatccagaaaggaagaggagcccctagtcttctgggggagtccctgccacacccccaggaacccctgacactggaggcccagcctcagccggctctgaggctggcacaggatggcccctcaccacaggccgcctcctcctctcggccctctccagggccctgttggtgttcaaggaccccctggccctgctggagaggaaggaaagcgaggagctcgaggtgaacccggacccactggcctgcccggaccccctggcgagcgtgtaagtgtccctgcccgccccctcccactccaccctcattgcctggctggtgcctgtgtgtcgcggagttcactggcctcctctcctcctgcagggtggacctggtagccgtggtttccctggcgcagatggtgttgctggtcccaaggtaacctctccttgcggccggggggctgaccctgccgctccctgggcatcttcttcctcttttggcccgtggcaaagagccacaaacttgagaccctaactgttcctgtgacttcccccaaccagggtcccgctggtgaacgtggttctcctggccccgctggccccaaaggatctcctggtgaagctggtcgtcccggtgaagctggtctgcctggtgccaaggtgaggccccaggctttcagcctggcttggccaggccctgaccatcccgtgtagggtctgggatgaggcgttctggatcaggcccaagggtctgccctctggagtcctcccccacctccatcatgcttctccccaagtcccactcatacctctctgcctccctagggtctgactggaagccctggcagccctggtcctgatggcaaaactggcccccctgtaagtatcactccccctgaaccccctgccattgtcctgtctgcctccctgctgtcctcactgctgctttcgtgcctcccatccttagggtcccgccggtcaagatggtcgccccggacccccaggcccacctggtgcccgtggtcaggctggtgtgatgggattccctggacctaaaggtgctgctgtgagtattaagtgaggatccatgaagagccagggacaaacacacctgagacttgaaggagtcctgggctctgggctcagctgtgccgctgacctgccgtgtggccactcactctcactttctggacctcagcctccctatctgtaaaatgaaagacttctcggcggggcacggtggctcatgcctgtaatcccagcactttgggaggccaaggcgggcagaccatgaggtcaggagtttgagaccagtcgggccaacatagtgaaaccacgtctctactaaaaatacaaaagattagctgggtgtggtggtgtgcacctgtaaccccagctagtcaggaggctgaggcaggagaattgcatgaacccgggaggtggaggttgcagtgagctgagatcacgccattgcactccagcctgggcaacagtgcgagattccatctcaaaaaaaaaaaaaaaaagaagaaagaaagaaagaaaaaatgaaacacttctccaggctccatgaccactgctctgtcctgaaataagtgttgttggtggccctccaccccgacacgtggggataggacaggcctttgatatgataggcacccccagtcttggtggattctttgaggtccaaaaggagatagcagagaagatgaaagccctttgcagtgcaggccacagcgggcatctaacagggaaaaggcagaggagcctggaagggcatcttgggaggagtgggctcagaaagggcccagcaagaagcacctgcaggggcattccccgggggccaaacagtcttttgaaaagaaagtcccttaaaaagtcccactcagagtaaatgagaggccccaggaggccctggcttctcacttcagccccctcaaccctaactccctttctccacagggagagcccggcaaggctggagagcgaggtgttcccggaccccctggcgctgtcgtaagtatctcctttccatccctacctccttcccattgctgccccggcactttctcctccctgcaggaggggtgctagaggccacggtcctcagctgctcggggcctcctaaccctgagttcccctttgctctctccctgcagggtcctgctggcaaagatggagaggctggagctcagggaccccctggccctgctgtgagtgtccctgatggggagatctggggagcagaaaaggggagacaccctcagcccctcgtctcctcggcctccccgtgactgtagtgttctctctgtgcagggtcccgctggcgagagaggtgaacaaggccctgctggctcccccggattccaggtgaggcctcatggctgtcaggatgctgggaggtaggggtaggaaacacctctttggtctcttccagattctaaaccttccctcccttcttcccccatttcccacctacagggtctccctggtcctgctggtcctccaggtgaagcaggcaaacctggtgaacaggtaagagggagcagccggccagaggggtgggagatgcagggaatccagagggacaggcccccgcctcctagctaatcagacagccatcaactagagggattgaggttagacaccggaaagaacttcctcccatgaagggagcagcacagagggaagtgggggctgcatgattgctagtctgggtgacttcttttaagagctgctggaatatgctgtgactttccctcaacccttgtattgataaatcttggtccatagtttggggaggggggaagcctttgacacatccctaggaggaagagaggggctgtttgggataatctcaattcagtgctgagaaggggttcctctctaatcacggccagaccccaggaggaaggaccgtgctttccagcagagtggccccaggtaggttttgctcactgtctgttcctctctccctccccctcagggtgttcctggagaccttggcgcccctggcccctctggagcaagagtaagtaggcctctctcgctgcatccgtcaaggtgcgttgtacttggccctatctccagagcagccttcacatgccctgtccttcccttctagggcgagagaggtttccctggcgagcgtggtgtgcaaggtccccctggtcctgctggtccccgaggggccaacggtgctcccggcaacgatggtgctaaggtgagggcagcgtggaaggggctctggcaagtggcccagggaccaggtctcacccctcctgcagcaggggatggcgggccatgaccaaagccatggagatagggtgtggggtggggggaaaagaccagggcaggggcccacacacagcctggagtctgggctgtgagtcttttcatcttttctcaaggcttgtcgttggccttggaaacaagcctgggagataccaagcggggcttagggctgtgacccactcttggggccccaggcctcactccagtcttcttggttgtcacatagggtgatgctggtgcccctggagctcccggtagccagggcgcccctggccttcagggaatgcctggtgaacgtggtgcagctggtcttccagggcctaagggtgacagagtaagttcaaccttccccctcccctgagccctacatggctcccatctctgcctgctttgaatctctcagcatctctccttctctctgggatctgtccctcttctcgctaatcctcccctcttcccctttcccctctggcctttttgctgatgaatcctctccctgtggtccaggcccatctatccccatgggttaccatggtgatgagaggtgggggcatctccttggtggaggctcccttattcatcccgctacacaagtcaggggcctcttaacctcagttccacctgagtctccaggcaggaaccctttttcctgaaagaatctttgagtccttggcccaggtggaggcagggcagagctgcagagggcctctcaggaaacccagacacaagcagaacactataggtcacctccttgccccacactggaaatctcaagcttatccatgtctttagggtgatgctggtcccaaaggtgctgatggctctcctggcaaagatggcgtccgtggtctgaccggccccattggtcctcctggccctgctggtgcccctggtgacaaggtgaggtggccgcctccccaccttctgccctaacacatagcctcctcagcaggcctgggcacggttccgtggggttgcgttgggagagcaggtcctgccaaactgagctgtcaacctgggaacctggagggaccagaaggaggggaggctctcctggggtcatctactaggagtattcaggggaggccctgaccctgagcctcttgtcccttgctctcagggtgaaagtggtcccagcggccctgctggtcccactggagctcgtggtgcccccgtaagtacagaagacctgttaagaccccatacttggcccttccctcccttcacacagcacccctggccctgtctgtgccttcaccccttgcctctcccctcaccgcatccccgccttccctcctgtcagacgcatctctccaatctgactccttttcttctagggagaccgtggtgagcctggtccccccggccctgctggctttgctggcccccctgtgagtaccaagacccccatcatttttcatcaccgactgggacctgggacctcgagggacggaatgaggacaaaggcgtcagccatcctcaggggagaagggtggagacgggattgtttcccacccaagcatcttcctgcctccattactgctcctcccccaggtagtggaaactcctgcctccttccctccattcaccgccctgcttcctcccccagggtgctgacggccaacctggtgctaaaggcgaacctggtgatgctggtgctaaaggcgatgctggtccccctggccctgccggacccgctggaccccctggccccattgtgagtggcttggccctctgtgcccacgaggctggtgggctgggacccaggacgggtccaggcttgatgcgtctgtgctctcctacagggtaatgttggtgctcctggagccaaaggtgctcgcggcagcgctggtccccctgtgagtatcacccgcctctctgttgagcctctcccctctccccaggcagcggtggcaggtgagggcagctgggtcggatgagttggctgttctccctctgactgttcctatgttctctccttccagggtgctactggtttccctggtgctgctggccgagtcggtcctcctggcccctctgtaagtctctgcagcagagtccactgctctaggttgggggtgctgggtgggggctgccagaaggatggtggggctgactgaggacccaatgatgcaccagagccccctggagtctgacagcccctcctatcctcatccagggaaatgctggaccccctggccctcctggtcctgctggcaaagaaggcggcaaaggtccccgtggtgagactggccctgctggacgtcctggtgaagttggtccccctggtccccctggccctgctggcgagaaaggatcccctggtgctgatggtcctgctgtaagtgccagctcagatctctgcagctccggaggtgtgcagagctggggaggggtccctgtgctgctgtctggcacctcacccctgtttgcctcccaaagggtgctcctggtactcccgggcctcaaggtattgctggacagcgtggtgtggtcggcctgcctggtcagagaggagagagaggcttccctggtcttcctggcccctctgtaagtgcccccctcaccttggggggccctgagaaaaaccatcacaggacttggagtggggcggagccaaggagaacagatttggtagagatgactccagcggactcaagggtcctcccagaccctatctctggcctgactctttcttctcccttagggtgaacctggcaaacaaggtccctctggagcaagtggtgaacgtggtccccctggtcccatgggcccccctggattggctggaccccctggtgaatctggacgtgaggtgagcagtccccagcccccatgccagtaccctcagcatggccattgtggccttgcctaagccctcttccccggctgactctcacttctctctctctctctctgcagggggctcctggtgccgaaggttcccctggacgagacggttctcctggcgccaaggtaagatggcaacactccatgaccacagccttgtctgctgcttccctgccccatcctggcccttcacccggggctgacccatattcccctgctctccccgccagggtgaccgtggtgagaccggccccgctggaccccctggtgctcctggtgctcctggtgcccctggccccgttggccctgctggcaagagtggtgatcgtggtgagactgtaagtagctgggctccagttccctgtacctggtcaggccagggactcttcaggcctccttagaggcctggggatgggtgtcggacttcacccaggcagggggaggaaaggagatcctgcaagatgtcagggccttaatccaaaaaactgagttaaagctcagccctaagtcccctctcccagacaggaccgcctctcccatgagttggccccagctcccgtgaagattgcagtggggaggtttccctgggagttgggagagatggccacagtgggaagcagctgaggagagagagatccagcagaggggaggcctcatcctgcagccccagcctcagccttccctggccaagagctcatgctttccttgctctccccagggtcctgctggtcccgccggtcctgtcggccctgttggcgcccgtggccccgccgtaagtaccctgctgtgtcccccatgccttcagaactctacagatgcagacagtgccccactcgatgccaatggaacttccgcctgacagtttgtccctttctctcttctagggaccccaaggcccccgtggtgacaagggtgagacaggcgaacagggcgacagaggcataaagggtcaccgtggcttctctggcctccagggtccccctggccctcctgtaagtatgctcagcccctccccagtccccatgctgtgctgtgggataggagggggagcttcgcctcagtttccccctctggatagtcattctttcccctccctagtggggactggggtctgaagatttgtgggcatgtccaagtagcttctgagagggtgaggggtacacagagagggattatgggagaggtctctgcctatggacaccctcgggctagatttccagaataatgaaggggcatgggttgcccacactgcccttgtctctccagccaggccctcaggctacatttgacgctcactgggcctgaactgccttttttatctgtccttcagggctctcctggtgaacaaggtccctctggagcctctggtcctgctggtccccgagtaagtcatgccttctctctcctcttcctgagccccaagcccaggctcacctcggggacccttgccaggacccaggcaccctttgcctctctggagaagggttcagggacagggagtgggcaaagaaaggaagaatcctgaacaaacaatctgatctagctttggcctctctgctccccaatccgtcctcccctggctcagcggctgggaggagctatggcatgtcctatggaaagaggctgaggctggctctatgagccgtggggccagagccagcagggagggtggtgggcctctcctccagagctggggttgttcgggcttctggcagcctttctcaaaccatttcccccactccagggtccccctggctctgctggtgctcctggcaaagatggactcaacggtctccctggccccattgggccccctggtcctcgcggtcgcactggtgatgctggtcctgttgtatgtagcccctcatcccctctgctcatggccctccagcccccatagcacttggatgccggaatccccactctcttccctctctgtgcagggtccccccggccctcctggacctcctggtccccctggtcctcccagcgctggtttcgacttcagcttcctgccccagccacctcaagagaaggctcacgatggtggccgctactaccgggctgatgatgccaatgtggttcgtgaccgtgacctcgaggtggacaccaccctcaagagcctgagccagcagatcgagaacatccggagcccagagggaagccgcaagaaccccgcccgcacctgccgtgacctcaagatgtgccactctgactggaagagtggtgtgggcctgccctagcctctccctccctcctactcctgccatgccagggtccccatgcccatatgtgcccctaccatatggtgctggctgctccctttccctgactccatcttgccctgccctaccacaggagagtactggattgaccccaaccaaggctgcaacctggatgccatcaaagtcttctgcaacatggagactggtgagacctgcgtgtaccccactcagcccagtgtggcccagaagaactggtacatcagcaagaaccccaaggacaagaggcatgtctggttcggcgagagcatgaccgatggattccaggtgcgtgagctggacctcagagccagtgttaggagatgggctagcccagtgctcagaagggacatgaagtcctggagtaggtctctgctaagggtgatggacagagctgggctgggaggcaggggtctcaggtccctgctagtggttcagacacaggctgccgatgggcaggtggtgcccctctgatataacggtgcattgggcagctctctgaggaccctggacaggaggccagcaggactagaggttcccgcatagctcactcttccctctctctcctccctgcagttcgagtatggcggccagggctccgaccctgccgatgtggccatccagctgaccttcctgcgcctgatgtccaccgaggcctcccagaacatcacctaccactgcaagaacagcgtggcctacatggaccagcagactggcaacctcaagaaggccctgctcctcaagggctccaacgagatcgagatccgcgccgagggcaacagccgcttcacctacagcgtcactgtcgatggctgcacggtgagtgcccagaatccccaggcagggccccacctctccggccttgggcattttggccaggccatagtgccctctctccatcactcccacgtggtaatgccccctcccgttgtctccgccccaccccagagtcacaccggagcctggggcaagacagtgattgaatacaaaaccaccaagacctcccgcctgcccatcatcgatgtggcccccttggacgttggtgccccagaccaggaattcggcttcgacgttggccctgtctgcttcctgtaaactccctccatcccaacctggctccctcccacccaaccaactttccccccaacccggaaacagacaagcaacccaaactgaacccccccaaaagccaaaaaatgggagacaatttcacatggactttggaaaatatttttttcctttgcattcatctctcaaacttagtttttatctttgaccaaccgaacatgaccaaaaaccaaaagtgcattcaaccttaccaaaaaaaaaaaaaaaaaaaaaagaataaataaataactttttaaaaaaggaagcttggtccacttgcttgaagacccatgcgggggtaagtccctttctgcccgttgggttatgaaaccccaatgctgccctttctgctcctttctccacaccccccttggcctcccctccactccttcccaaatctgtctccccagaagacacaggaaacaatgtattgtctgcccagcaatcaaaggcaatgctcaaacacccaagtggcccccaccctcagcccgctcctgcccgcccagcacccccaggccctggggacctggggttctcagactgccaaagaagccttgccatctggcgctcccatggctcttgcaacatctccccttcgtttttgagggggtcatgccgggggagccaccagcccctcactgggttcggaggagagtcaggaagggccacgacaaagcagaaacatcggatttggggaacgcgtgtcatcccttgtgccgcaggctgggcgggagagactgttctgttctgttccttgtgtaactgtgttgctgaaagactacctcgttcttgtcttgatgtgtcaccggggcaactgcctgggggcggggatgggggcagggtggaagcggctccccatttttataccaaaggtgctacatctatgtgatgggtggggtggggagggaatcactggtgctatagaaattgagatgcccccccaggccagcaaatgttcctttttgttcaaagtctatttttattccttgatattttttctttctttttttttttttttgtggatggggacttgtgaatttttctaaaggtgctatttaacatgggaggagagcgtgtgcgctccagcccagcccgctgctcactttccaccctctctccacctgcctctggcttctcaggcctctgctctccgacctctctcctctgaaaccctcctccacagctgcagcccatcctcccggctccctcctagtctgtcctgcgtcctctgtccccgggtttcagagacaacttcccaaagcacaaagcagtttttccctaggggtgggaggaagcaaaagactctgtacctattttgtatgtgtataataatttgagatgtttttaattattttgattgctggaataaagcatgtggaaatgacccaaacataatccgcagtggcctcctaatttccttctttggagttgggggaggggtagacatggggaaggggccttggggtgatgggcttgccttccattcctgccctttccctccccactattctcttctagatccctccataaccccactcccctttctctcacccttcttataccgcaaacctttctacttcctctttcattttctattcttgcaatttccttgcaccttttccaaatcctcttctcccctgcaataccatacaggcaatccacgtgcacaacacacacacacactcttcacatctggggttgtccaaacctcatacccactccccttcaagcccatccactctccaccccctggatgccctgcacttggtggcggtgggatgctcatggatactgggagggtgaggggagtggaacccgtgaggaggacctgggggcctctccttgaactgacatgaagggtcatctggcctctgctcccttctcacccacgctgacctcctgccgaaggagcaacgcaacaggagaggggtctgctgagcctggcgagggtctgggagggaccaggaggaaggcgtgctccctgctcgctgtcctggccctgggggagtgagggagacagacacctgggagagctgtggggaaggcactcgcaccgtgctcttgggaaggaaggagacctggccctgctcaccacggactgggtgcctcgacctcctgaatccccagaacacaacccccctgggctggggtggtctggggaaccatcgtgcccccgcctcccgcctactcctttttaagctt

SEQ ID NO: 22715 - DNA, 3732 bp, Homo Sapiens
  misc_feature (50)..(50): n is a, c, g, or t
cctcccaggcgtccccaccctaggaggctgcatgcggattgaagacgtgngcctgggggctgggccggccccgctgatcccgacctagcgagcaggatagcaggaccgcccaggctgcggaggggctcgggggcaggaaggtcagagcagcaagatggccagtaagaccaaggccagcgaggccctcaaggtggtggcccggtgccgccccctcagcaggaaggaggaggctgctggtcacgagcagatcctgaccatggacgtgaaactgggccaggtgaccctgcggaacccccgcgccgccccgggggagctgcccaagaccttcacctttgacgccgtgtatgatgccagctccaagcaggccgacctgtatgacgaacgtgagcccctgatagactccgtgctccagggtttcaatggcacggtgtttgcctatggccagacgggcactggcaagacctataccatgcagggggacctggtggagcccgagctgcgcggggtcatcccgaatgcctttgagcacatcttcacccacatctcccgctcccagaaccaacagtacctggtccgggcctcctatttggagatctaccaggaagagattcgagacctgctctccaaggagccgggcaggaggctagagctgaaagagaaccccgagactggcgtctacatcaaggacctctcctccttcgtcaccaagaatgtcaaggagattgagcatgtgatgaacctggggaaccagacccgggctgtgggcagcacccacatgaatgaggtcagctcccgctcccatgccatcttcatcatcactgtggagtgcagcgaacgtggctctgatggccaggaccacatccgagtgggcaagctcaacctcgtggacctggctggcagcgagaggcagaacaaggcaggccccaacacagcgggaggggcagccacaccatcctcgggtggcggtggtggcggtggaggcagtggtggtggtgctggtggagagaggcctaaggaagcctccaaaatcaacctctcattatctgccctgggcaacgtgattgctgccctggcgggcaacaggagcacccacattccctaccgggactccaagctgacccggctgctccaggactccctgggggggaatgccaagaccatcatggtagccacactggggccagcttctcacagctacgatgagagcctctccaccttgcgctttgccaaccgagccaagaacatcaagaacaagccccgggtgaacgaggaccccaaggacacactgctgcgggaattccaagaggagattgcccgcctgaaggcccagctggagaagagggggatgctggggaagcggccccggaggaagagcagccgcaggaagaaggccgtgtccgccccgcctgggtaccctgagggcccagtgattgaggcctgggtggcagaagaggaggatgacaacaacaacaaccaccgcccgccccagcccatcctggagtcagccttggagaagaacatggagaattacctgcaggaacagaaggagcggctggaggaggataaggcagccatccaggatgaccgcagcctggtgagcgaggagaagcagaagctgctggaggagaaggagaagatgctggaggacctgcggcgggaacagcaggccacagagctgcttgcggccaagtacaaggccatggagagcaagctcctcatcgggggcaggaacatcatggatcacaccaacgaacagcagaagatgttggaactgaagaggcaggagattgccgagcagaaacgtcgtgagcgggagatgcagcaggagatgatgctccgggacgaggagactatggagctccggggcacctacacatccctgcagcaggaggtggaggtcaaaaccaagaaactcaagaagctctacgccaagctgcaggcggtgaaggcggagatccaggaccagcatgatgagtatatccgcgtgcggcaggacctggaggaggcgcagaacgagcagacccgcgaactcaagctcgggtacctaatcatcgagaacttcatcccgccggaggagaagaacaagatcatgaaccggcttttcctggactgtgaggaggagcagtggaagttccagccactggtgccagccggcgtcagtagcagccagatgaagaagcggccaacatctgcagtgggctacaagaggcctatcagccagtatgctcgggttgccatggcaatggggtcccaccccaggtacagggctgaaaacataatgtttctggagttggatgtgtcccctccagctgtctttgagatggaattctctcacgaccaagaacaagaccctcgtgcgctacacatggagaggctcatgcgattggacagctttctggaaagaccttccacgtctaaagtccgaaagtccagatcctggtgccagagtcctcagcggcctccaccttccaccacacatgcctccctggcctctgcttctctgcgccctgcaacagtggcggaccatgagtgacaaccatcacgtcaggctgcccatccaatagactcctgggatggggcagccaaccctggctcatctcatctgccgcttggtgcgtgtgcgtgtgcgtgcatgtgcgtgtgcgtgtgtgcaggggtgagaatctggcagatggtgcctctgcctgctcttcttcgcctcctttatttaattcatgttatttattcgcggagctcagttcgtgttggggagatgccctcgcctgagccgtctgggcctaccgtggtcactgcgtagctctttttcttctgacttgagagctcccccagtcagatctcaggcttgtccccctgtcagctgcctccagaagggaaggtagccagtgcctgagaagacagtcccttttctacccaccgcactccataacctccatcttctcccacactgatggcgagcagcccctgagcactttctgggactgggagactgcttggtgttccctgaggacaagagacatcctgacagtgttgggcatctgctaccccgtggacacagccccactctccactttctgagcctcagacaacctcattcagcctcttgggctccttttcaaggacattaataacctcaccaacatagctcatgcccttcagctttgacaagaactcacggcttcccaaactctgctttctgcccaccttggatgggaactgtggaccaagcaattaccatcgccttggaacctgcaggaaatggaacagcaattgagacaacttgaacagtcatcaacggaagtccctccactggattcctttgtttctgtcccctccgaggagtcattttggtcgacaggctctcaaggcaactccccattttcaagaggctgctcctgcctgcttcgatcatttctccctgcagctgcctagaccccgttcacagtgggaggagtcaatgtcattctacccctcgctaaacgaagatattaacatctattgctttttcccttcatctgtcacaggaaacagaagcccaggcacaatcttttccagctttgcctgttacccctgtttctgattgcatctttaaggtattattttgttgacaatagatcctttattcactagttacgcaaattggttcctagggggatactccttaccttcctttgtgatggcccaaaatgtctctaggtatctcaagtgataagtaaatttctacaaaaaaaaaaa

SEQ ID NO: 22716 - DNA, 1305 bp, Homo Sapiens
cgcggctcagtaattgaaggcctgaaacgcccatgtgccactgactaggaggcttccctgctgcggcacttcatgacccagcggcgcgcggcccagtgaagccaccgtggtgtccagcatggccgcgctgctcctgggcgcggtgctgctggtggcccagccccagctagtgccttcccgccccgccgagctaggccagcaggagcttctgcggaaagcggggaccctccaggatgacgtccgcgatggcgtggccccaaacggctctgcccagcagttgccgcagaccatcatcatcggcgtgcgcaagggcggcacgcgcgcactgctggagatgctcagcctgcaccccgacgtggcggccgcggagaacgaggtccacttcttcgactgggaggagcattacagccacggcttgggctggtacctcagccagatgcccttctcctggccacaccagctcacagtggagaagacccccgcgtatttcacgtcgcccaaagtgcctgagcgagtctacagcatgaacccgtccatccggctgctgctcatcctgcgagacccgtcggagcgcgtgctatctgactacacccaagtgttctacaaccacatgcagaagcacaagccctacccgtccatcgaggagttcctggtgcgcgatggcaggctcaatgtggactacaaggccctcaaccgcagcctctaccacgtgcacatgcagaactggctgcgctttttcccgctgcgccacatccacattgtggacggcgaccgcctcatcagggaccccttccctgagatccaaaaggtcgagaggttcctaaagctgtcgccgcagatcaatgcttcgaacttctactttaacaaaaccaagggcttttactgcctgcgggacagcggccgggaccgctgcttacatgagtccaaaggccgggcgcacccccaagtcgatcccaaactactcaataaactgcacgaatattttcatgagccaaataagaagttcttcgagcttgttggcagaacatttgactggcactgatttgcaataagctaagctcagaaactttcctactgtaagttctggtgtacatctgaggggaaaaagaattttaaaaaagcatttaaggtataatttatttgtaaaatccataaagtacttctgtacagtattagattcacaattgccatatatactagttatatttttctacttgttaaatggagggcattttgtattgtttttcatggttgttaacattgtgtaatatgtctctatatgaaggaactaaactatttcactga

SEQ ID NO: 22717 - DNA, 2040 bp, Homo Sapiens
gcccgcagctgcagagagtcccgctgcgtctccgccgcgtgcgccctcctcgaccagcagacccgcgctgcgctccgccgctgacatgtgtgccgctcagatgccgcccctggcgcacatcttccgagggacgttcgtccactccacctggacctgccccatggaggtgctgcgggatcacctcctcggcgtgagcgacagcggcaaaatagtgtttttagaagaagcatctcaacaggaaaaactggccaaagaatggtgcttcaagccgtgtgaaataagagaactgagccaccatgagttcttcatgcctgggctggttgatacacacatccatgcctctcagtattcctttgctggaagtagcatagacctgccactcttggagtggctgaccaagtacacatttcctgcagaacacagattccagaacatcgactttgcagaagaagtatataccagagttgtcaggagaacactaaagaatggaacaaccacagcttgttactttgcaacaattcacactgactcatctctgctccttgccgacattacagataaatttggacagcgggcatttgtgggcaaagtttgcatggatttgaatgacacttttccagaatacaaggagaccactgaggaatcgatcaaggaaactgagagatttgtgtcagaaatgctccaaaagaactattctagagtgaagcccatagtgacaccacgtttttccctctcctgctctgagactttgatgggtgaactgggcaacattgctaaaacccgtgatttgcacattcagagccatataagtgaaaatcgtgatgaagttgaagctgtgaaaaacttataccccagttataaaaactacacatctgtgtatgataaaaacaatcttttgacaaataagacagtgatggcacacggctgctacctctctgcagaagaactgaacgtattccatgaacgaggagcatccatcgcacactgtcccaattctaatttatcgctcagcagtggatttctaaatgtgctagaagtcctgaaacatgaagtcaagatagggctgggtacagacgtggctggtggctattcatattccatgcttgatgcaatcagaagagcagtgatggtttccaatatccttttaattaataaggtaaatgagaaaagcctcaccctcaaagaagtcttcagactagctactcttggaggaagccaagccctggggctggatggtgagattggaaactttgaagtgggcaaggaatttgatgccatcctgatcaaccccaaagcatccgactctcccattgacctgttttatggggacttttttggtgatatttctgaggctgttatccagaagttcctctatctaggagatgatcgaaatattgaagaggtttatgtgggcggaaagcaggtggttccgttttccagctcagtgtaagaccctcgggcgtctacaaagttctcctgggattagcgtggttgtgcatctcccttgtgcccaggaaagaaacaattcacttaccagcctcctcaccccatcctccaccatttccttaatgttccatggtattttcaacggaatacactttgaaagacctgagtgtgaaagactgagagttgaggagttactttgtggatcttgtccaaatttagtgaaatgtggaagtcaaccagaccaatgatggaattaaatgtaaattccaagagggctttcacagtccacagggttcaaatgacttgggtaacagaagttattcttagcttacctgttatgtgacagtgatttacctgtccatttccaacccaaaagcctgtcagaaagcattctttagagaaaaccacttaacatttgttgttaaactcctgatcgctactcttaagaatatacatgtatgtattcataggaacattttttctcaatatttgtatgattcgcttactgttattgtgctgagtgagctcctgtgtgcttcagacaaaaataaatgagactttgtgtttacgttaaaaaaaaaaaaaaaaaaaaaa

SEQ ID NO: 22718 - DNA, 2733 bp, Homo Sapiens
ctcgcgaggccggctaggcccgaatgtcgttagccgtggggaaagatggcggaaaatttaaaaggctgcagcgtgtgttgcaagtcttcttggaatcagctgcaggacctgtgccgcctggccaagctctcctgccctgccctcggtatctctaagaggaacctctatgactttgaagtcgagtacctgtgcgattacaagaagatccgcgaacaggaatattacctggtgaaatggcgtggatatccagactcagagagcacctgggagccacggcagaatctcaagtgtgtgcgtatcctcaagcagttccacaaggacttagaaagggagctgctccggcggcaccaccggtcaaagaccccccggcacctggacccaagcttggccaactacctggtgcagaaggccaagcagaggcgggcgctccgtcgctgggagcaggagctcaatgccaagcgcagccatctgggacgcatcactgtagagaatgaggtggacctggacggccctccgcgggccttcgtgtacatcaatgagtaccgtgttggtgagggcatcaccctcaaccaggtggctgtgggctgcgagtgccaggactgtctgtgggcacccactggaggctgctgcccgggggcgtcactgcacaagtttgcctacaatgaccagggccaggtgcggcttcgagccgggctgcccatctacgagtgcaactcccgctgccgctgcggctatgactgcccaaatcgtgtggtacagaagggtatccgatatgacctctgcatcttccggacggatgatgggcgtggctggggcgtccgcaccctggagaagattcgcaagaacagcttcgtcatggagtacgtgggagagatcattacctcagaggaggcagagcggcggggccagatctacgaccgtcagggcgccacctacctctttgacctggactacgtggaggacgtgtacaccgtggatgccgcctactatggcaacatctcccactttgtcaaccacagttgtgaccccaacctgcaggtgtacaacgtcttcatagacaaccttgacgagcggctgccccgcatcgctttctttgccacaagaaccatccgggcaggcgaggagctcacctttgattacaacatgcaagtggaccccgtggacatggagagcacccgcatggactccaactttggcctggctgggctccctggctcccctaagaagcgggtccgtattgaatgcaagtgtgggactgagtcctgccgcaaatacctcttctagcccttagaagtctgaggccagactgactgagggggcctgaagctacatgcacctcccccactgctgccctcctgtcgagaatgactgccagggcctcgcctgcctccacctgcccccacctgctcctacctgctctacgttcagggctgtggccgtggtgaggaccgactccaggagtcccctttccctgtcccagccccatctgtgggttgcacttacaaacccccacccaccttcagaaatagtttttcaacatcaagactctctgtcgttgggattcatggcctattaaggaggtccaaggggtgagtcccaacccagccccagaatatatttgtttttgcacctgcttctgcctggagattgaggggtctgctgcaggcctcctccctgctgccccaaaggtatggggaagcaaccccagagcaggcagacatcagaggccagagtgcctagcccgacatgaagctggttccccaaccacagaaactttgtactagtgaaagaaaggggtccctggcctacgggctgaggctggtttctgctcgtgcttacagtgctgggtagtgttggccctaagagctgtagggtctcttcttcagggctgcatatctgagaagtggatgcccacatgccactggaagggaagtgggtgtccatgggccactgagcagtgagaggaaggcagtgcagagctggccagccctggaggtaggctgggaccaagctctgccttcacagtgcagtgaaggtacctagggctcttgggagctctgcggttgctaggggccctgacctggggtgtcatgaccgctgacaccactcagagctggaaccaagatctagatagtccgtagatagcacttaggacaagaatgtgcattgatggggtggtgatgaggtgccaggcactaggtagagcacctggtccacgtggattgtctcagggaagccttgaaaaccacggaggtggatgccaggaaagggcccatgtggcagaaggcaaagtacaggccaagaattgggggtgggggagatggcttccccactatgggatgacgaggcgagagggaagcccttgctgcctgccattcccagaccccagccctttgtgctcaccctggttccactggtctcaaaagtcacctgcctacaaatgtacaaaaggcgaaggttctgatggctgccttgctccttgctcccccaccccctgtgaggacttctctaggaagtccttcctgactacctgtgcccagagtgcccctacatgagactgtatgccctgctatcagatgccagatctatgtgtctgtctgtgtgtccatcccgccggccccccagactaacctccaggcatggactgaatctggttctcctcttgtacacccctcaaccctatgcagcctggagtgggcatcaataaaatgaactgtcgactgaaaaaaaaaa

SEQ ID NO: 22719 - DNA, 1407 bp, Homo Sapiens
cgaccaacggaccggacagagacgaggagaggaacaggaagagagaagctgggagaatcgggaacctgggggctagtgacctgcacacagggcaggggcactcggcagttcccagaggccacccctcccaccccagacatccagacatctggaactttgggtgccaagagtccagcttaatgcaggcagcctggcttttgggggctttggtggtcccccagctcttgggctttggccatggggctcggggagcagagagggagtgggagggaggctggggaggtgcccaggaggaggagcgggagagggaggccctgatgctgaagcatctgcaggaagccctaggactgcctgctgggaggggggatgagaatcctgccggaactgttgagggaaaagaggactgggagatggaggaggaccagggggaggaagaggaggaggaagcaacgccaaccccatcctccggccccagcccctctcccacccctgaggacatcgtcacttacatcctgggccgcctggccggcctggacgcaggcctgcaccagctgcacgtccgtctgcacgcgttggacacccgcgtggtcgagctgacccaggggctgcggcagctgcggaacgcggcaggcgacacccgcgatgccgtgcaagccctgcaggaggcgcagggtcgcgccgagcgcgagcacggccgcttggagggctgcctgaaggggctgcgcctgggccacaagtgcttcctgctctcgcgcgacttcgaagctcaggcggcggcgcaggcgcggtgcacggcgcggggcgggagcctggcgcagccggcagaccgccagcagatggaggcgctcactcggtacctgcgcgcggcgctcgctccctacaactggcccgtgtggctgggcgtgcacgatcggcgcgccgagggcctctacctcttcgaaaacggccagcgcgtgtccttcttcgcctggcatcgctcaccccgccccgagctcggcgcccagcccagcgcctcgccgcatccgctcagcccggaccagcccaacggtggcacgctcgagaactgcgtggcgcaggcctctgacgacggctcctggtgggaccacgactgccagcggcgtctctactacgtctgcgagttccccttctagcggggccggtaccccgcctccttgcccatcccaccacccggcctttccctgcgccgtgcccaccctcctccggaatcgcccttcccttcctggccacgaatggcagcgtcctccccgacccccagtctgggcgcttctgggagggctcttgcggtgccggcactcctccttgttagtgtctttccttgaaggggcgggcaccaggctaggtccggtgccaataaatccttgtggaatctgaaaaaaaaaaaaaaaa

SEQ ID NO: 22720 - DNA, 6330 bp, Homo Sapiens
agtcccagcctgccggccggtactcaccgctacccggagttcgctcagacggtgagatttggggcgggtccgaggcagcggcgggacgtacctgcgaccgggaccatgaggagctgccagacccgtggggccggtaacgagagcagtcgcggcacctgctgagaggaaagagggagcggtcccgcgcggctggggcgcggcagaggcttgcccgatcctcggccatgtcactgctctgcgtgcgcgttaaaagggccaaattccagggttcaccagataaatttaacacatatgtgaccctgaaagtacagaatgtgaagagcacaactgtagcagttcgtggtgatcagccttcctgggaacaggatttcatgtttgagattagtcgcctggacctgggtctaagtgtggaggtatggaacaaaggactgatctgggacaccatggtggggactgtgtggattgcgctgaagactattcgtcagtcggatgaggaagggcctggggaatggtccacattagaggcagagacgttaatgaaagacgatgagatctgtggaactagaaacccaactcctcataaaattttgcttgatacaagatttgagttgccttttgatatcccagaggaggaagccagatattggacctacaaatgggagcaaatcaatgccttgggagctgacaatgagtattctagtcaagaagaaagccagaggaagccattgcccactgctgccgcccagtgttcttttgaagaccctgatagtgccgtcgatgaccgagatagtgactatcgcagtgagaccagcaacagcttcccacctccttaccatacagcttcccagcccaacgcttctgtgcaccagttccctgtgccggtgcgatcgccacagcagctgctacttcaaggcagttcccgggactcttgtaatgactctatgcaaagttatgaccttgattatccagagcggcgggctatcagccccaccagcagcagtaggtatggctcctcctgtaatgtgagtcaaggaagctctcagctaagtgaactagaccagtatcacgaacaagatgacgaccatcgggagacggactcgattcattcttgccacagctctcacagcctgtccagagatggccaagcaggttttggagaacaagagaaacccttggaggtgacaggtcaagcagagaaggaggcagcatgtgaacccaaggagatgaaagaagatgccacaacccaccctcccccagatctggtgctgcaaaaagaccacttcctaggtccccaggagagttttcctgaggagaatgcatcttcaccatttacccaagccagagcacattggatccgagcagttaccaaggttcgactccagctgcaggagattccagatgatggtgacccctctctgcctcagtggctcccggaagggccagccggagggctctatggcattgacagcatgccagatttacgcagaaagaagccactgccacttgtcagtgatctgtcactggtccagtctcggaaggcaggaatcacttctgcaatggctacacgcacttctcttaaggacgaagagctgaaatcccacgtgtataagaaaaccctgcaggccttaatctaccccatttcgtgcaccactcctcataactttgaggtctggacggccactaccccaacctactgctatgagtgtgaaggcctgctctggggcattgcccggcagggcatgcgctgcagcgaatgtggagtcaagtgccatgagaagtgccaggatctgctcaatgctgactgcctgcagcgggctgcagaaaagagctgtaaacatggagctgaggaccggacccagaacattatcatggccatgaaggaccgcatgaagatccgagagcgaaataagccagagatctttgaagttatccgggacgtcttcacagtgaacaaagctgcccatgtgcagcagatgaaaacagtgaagcagagtgtactggatggcacctccaagtggtcagccaagatcaccattactgtggtgtgtgcccagggcctacaagccaaggacaaaacaggatccagtgacccttacgtgactgtgcaagtcagcaaaactaagaagcgtaccaagaccatttttggaaacttgaatcctgtttgggaggagaagttccattttgagtgccacaactcctctgaccgcattaaggtgcgtgtatgggatgaggatgatgacatcaagtcaagagtaaagcaacgcctaaagcgagagtctgatgatttccttggccaaaccatcattgaggttcggaccctaagtggcgagatggacgtctggtacaacttggagaagaggacagacaaatcagccgtctcaggggctatccgactacaaatcagtgtggagatcaagggggaggagaaagtagccccataccacgtgcagtatacatgtctccatgagaatcttttccattacctcacagacattcagggcagtggaggagtccgcatccctgaagctcgaggagacgatgcctggaaggtgtactttgatgagacagcccaagaaattgtggatgaatttgccatgcgttatggcattgagtccatatatcaggccatgacgcactttgcatgtttatcatccaagtacatgtgtcctggtgtgccagcagtgatgagcaccttactggccaacatcaacgcctactatgcccacacaactgcctctaccaatgtctctgcatctgatcgctttgcagcctccaactttgggaaagagagatttgtaaaactgctggaccagctacacaactcactgaggatcgacctctctacatacaggaataatttccctgctgggagtcctgaacggcttcaggacttaaaatccacagtggatttgctgaccagcattactttcttcagaatgaaggtacaagaactgcaaagccctccaagagccagccaggtggtaaaggattgtgtgaaggcctgtttgaactccacatatgaatatatcttcaacaactgccacgacttatacagccgccagtaccagctgaagcaggagctacctccagaggaacaagggcccagcattcggaacctggatttctggcccaagctcatcacactcatcgtgtcaatcatagaggaagataagaattcctacacacctgttctgaaccagtttcctcaggagttgaatgtgggaaaagtcagcgcagaagtgatgtggcatttgtttgcccaagacatgaaatatgcattggaggagcatgagaaagaccacctgtgtaaaagtgctgactacatgaacctgcacttcaaggtgaagtggctccacaatgaatacgtgcgggatctgcctgtcctccaggggcaggtgcctgagtacccagcgtggtttgagcagttcgtgctacaatggctggatgagaatgaggatgtatccctggaattcctgcgtggggccctggaacgagataagaaggatggattccagcagacatcagagcatgcactcttttcctgctctgtggtggatgtcttcacacaactcaatcagagctttgagatcatccggaagctggaatgcccagaccccagcatccttgcccactacatgaggaggtttgctaagaccatcgggaaggtgctgatgcagtatgcagacatcttgtcaaaggacttcccagcctattgcacaaaggagaaactgccctgcatcctgatgaacaacgtgcagcaactgagggtccagctggagaaaatgtttgaggccatgggaggcaaggagctggaccttgaagctgcagacagtctgaaggagccgcaggtgaaactgaatacggttctggatgagctcagcatggtgtttggaaacagtttccaggtacggattgatgagtgtgttcgacaaatggccgacatcctgggccaggttcggggcacagggaatgcatctccagacgccagggcctcagcggctcaggatgcagatagcgtactccggcctctcatggacttcctggatggcaacctcaccctctttgccactgtgtgtgagaagacggttctgaagcgtgtactgaaggagctctggcgcgtggtgatgaacacaatggagaggatgattgttctgcccccactcactgaccagacgggcacccagctgatcttcactgctgccaaggagctgagccatctttccaaactcaaggatcacatggtacgagaggaaacacggaatctcactccaaagcagtgtgcagtccttgacctcgccctggacaccatcaagcaatacttccatgcaggaggcaatgggctgaagaaaaccttcctggagaagagcccagatctgcagtctctacgctatgccctgtctctgtacacacagactactgacactctcatcaagaggtttgtgcgctcgcagaccacccaagggtctggtgtggacgatcctgtgggagaagtctctattcaggtggacttgtttacacaccctggtactggggagcacaaggtcacagtgaaagtggtggctgccaatgacctcaagtggcagacagcgggtatgttccggcctttcgtggaggtgactatggttggcccacaccaaagtgataagaagaggaagttcacaaccaaatccaaaagcaacaactgggcccccaagtacaatgagacattccacttactcctgggaaatgaggaggggcccgagtcctatgagttgcagatatgcgtgaaggattactgctttgcccgggaagatcgcgtgctagggctggctgtgatgcctctgagggatgtcacagccaagggcagctgtgcctgctggtgccccttgggccggaagatccatatggatgagacaggcctgaccattctccggattttatctcagaggagcaatgacgaggtggcccgagaatttgtgaaactcaaatcagagtctcgttccacggaggaggggagctgaagaggttcgactcctgtgccaatcaggcagcagcaatttcacaaatcagggccagtgggagttagctgtgtaaccggcttagggtctttgcagtcaagaggctgaccccttcagttaaagatatttaaggaaaaatttggggtggtgataatatggcttttcacagaaagggtcatgaagccctggcccaacaggactgtggtactaggggctgggatgtggggttaccacatggagagattttccattaagagagaaggacaaacatttctgagagtgtcagccattcttggtagacacctctccactcctcatcccacctctacccatctccatgccacaccttatccagttagacacatacataccaatcattagaagaacaagtttagaaggtgtggaacttgtgcctggctggctgggtagtcagctgagcctgttgctgagcccggtggtctggattggagtatggccagggcaggagtacacagaatagaatttagactgtcccttgagtagaatccactgattttctgtggctccagtgagaacaaggctttgaaactgaacaagataacttctagaaatgaactgtactaatccctttccccagattgtatcatgagtagaatcaggttcacgtggtgcttcaaagccctgagaagaatatttctttggaccccaggcactaggggccacctgcctgggagtctccctgcctcactcctctaggcaggggagtgatgcttcaggacgtgacaggctgttctaacatgtgtctacctgagggctagttgaaggatccaggagtattttcttcttgggtgggcctgaacaaaagccaaaaattgtagaaaccagtctagaaaaagtcctgctcatctgtggccactgccttctagccgtcctccaccttgcagaaagaatctagcctttggtctctctctctctcatcggggtcatttgctattcccctctgatattcaaccctatagaaggagcctggactctgatccctctgtacaggctggatggaaggggccctccacacttcctgggaggtcagagacaaactgtttcagagagtcagatggacttcccaagacttgttgagagatgtgacatggttcttggatttcctctgtagcagcctcctggacttcctgaggactcgacattgtccacagatgtactggccattacatgaaacaagaaaccaagcatctttgctgttgttaattattatatgtgccattgttacaggagattataggctagtctgtaataaattatcttatagcaaaaaaaaaaaaaaaaaaaaaaaaaaaaa

SEQ ID NO: 22721 - DNA, 3600 bp, Homo Sapiens
tcctcctcggcgaagtctccctggccgccccatgtcggccgcccccgcctacagcgaagacaagggcggctccgctggccccggggagcccgagtacggccacgaccccgcgagcggcggcatcttctcctccgactacaagcggcatgatgacctgaaggagatgctggacaccaacaaggattctctcaagctggaggccatgaagaggattgtggcgatgattgcccgaggaaagaatgcttcagacctgtttcccgcggtggtgaagaacgtggcctgtaagaacatagaggtgaagaagcttgtctatgtgtacctggtacgctacgctgaggagcagcaagacctggccctgctgtccatctccaccttccaacgtggcctaaaggatcccaaccagctgattcgtgccagtgccctccgtgtcctctctagcatccgtgtgcccatcatagtgcccatcatgatgctagctatcaaggaagccgcctcggacatgtcaccctatgtgcggaaaacagctgcccacgccatccctaaactctacagtttggactctgaccagaaggatcagctgatagaagtcattgagaagcttctggctgacaagaccacgctggtggcgggcagtgtggtgatggcctttgaggaggtctgcccggagcgcatcgacctgattcacaaaaactaccggaaactctgtaacctgctgatcgacgtggaggagtggggccaggtggtcatcatcagcatgctcacccgctacgcccgcacgcagttcctgagccccacccagaacgaatccctactagaggagaacgcggaaaaagccttctacggctcagaggaggacgaggccaagggcgcggggtctgaggagacggccgccgcggccgccccctcccgaaagccctatgtcatggaccccgaccaccggctgctgctgcgcaacaccaaacccctgctgcagagccgcagcgccgcggtggtgatggcggtggcgcagctctacttccacctggcgcccaaggcggaagtgggcgtcatcgccaaggcgctggtgcgcctgctgcgcagccacagtgaggtgcagtacgttgtgctccagaacgtggccaccatgtccatcaagcgccggggtatgtttgagccctacctgaagagcttctacatcaggtccaccgaccccacccagattaagatcctgaagctggaagtgctgaccaacctggccaatgagaccaacattcctactgtcctacgggaattccagacctatattcgcagcatggacaaggactttgtggcagccacaatccaggccattggacgctgtgcaactaacatcggccgagtccgtgacacctgcctcaatggcctggtgcagctgctgtccaaccgtgatgagcttgtggttgcagagtcagtggtcgtcattaagaaattgctacagatgcagccagcacaacatggagagatcatcaaacacttggcaaagcttacagacaacatccaggtgcccatggcccgagccagcatcctgtggctcatcggagagtactgtgagcatgtccccaggattgcacctgatgtcttaagaaaaatggccaagtcattcacagcagaggaggatattgtcaagctgcaggtcatcaacctggcagccaagctctacctgaccaactctaaacagaccaagctgctgacccagtatgtgctgagtctggccaaatatgaccagaactatgatattcgcgaccgggcgcgcttcacccggcagctcatcgtcccttccgagcagggtggggccctcagccgccatgccaagaagctcttcctggcacccaaaccagctccagtcttggagtcatccttcaaagaccgggaccacttccagctgggctcactgtcccacctgcttaatgccaaggccacaggctaccaggagctcccagactggccggaggaagccccagacccatctgtgcgcaacgtggaggtacctgaatggaccaagtgctcaaatcgggagaagagaaaggagaaggaaaaacccttctactcggactctgagggggagtcaggccccacggagtccgcagacagtgaccctgagtctgagagtgaatcggacagtaagagcagcagtgagagcggctctggggagtccagcagtgagtccgacaatgaagaccaggatgaggatgaggagaaagggagaggcagtgagagtgaacagagtgaggaggatggtaagaggaagacaaagaagaaggtgccagagagaaaaggagaagcgtcatcctctgatgagggcagcgattccagcagtagctcatcagagtccgagatgacatcggagtccgaggaggagcagttagaacctgcctcctggagcaggaaaacacctcccagcagcaaaagtgctcctgcaaccaaggagatctccctgcttgatctagaggatttcacccctcccagtgtccagcctgtgtctcccccagcaattgtgtctaccagtctggctgctgacctggagggcctgacactcacagactccaccctggtaccgtcgcttctgagtccagtatcgggtgttgggcggcaggagctgctgcaccgggtagctggcgaggggctggctgtggactacaccttcagccgccaacctttctccggggatccccacatggtgtccgtgcacatccacttctccaacagctctgatacccccatcaagggcctgcatgtgggcactcccaaactgcctgctggcatcagcatccaagaatttcccgaaattgagtccctggcacctggagaatctgccactgctgtaatgggcattaatttctgtgactcaacccaggcagccaacttccagctgtgcacccagacccgacagttctacgtctccattcagccacctgttggggagctgatggcccctgtgttcatgagtgaaaatgagtttaagaaggaacagggaaagctgatgggcatgaatgagatcacagagaaactcatgctgccagacacctgtcggagtgaccacattgtggtgcagaaagtgactgccactgccaacctgggtcgtgttccttgtgggacatctgatgagtacaggtttgcagggaggacactgactggtggaagcctcgttctgctgaccctggatgcccggccagctggagctgcccagctgactgtcaacagcgagaaaatggtgattggcaccatgctggtaaaggatgtgatacaggctctgacccagtgacttccaaatgctgtgacctgtttggctcccatctatacctccccatgacacctaggctgtcagtctctctcatctttctctctctctctcatcatcctcctcatgccagatagcattcagggtgtcctctctccctctggaggaccaagccctcccctaatgccctccccatggattccttagtgatctgtgcagagagagatggcagccactcccttcagtcctcccagatttctgtagctatttatgtagcaggctcaataaaatgtcttctctctaaaaaaaaaaaaaaaaaaaaaaaaaaaaaaaaaaaaaaaaaa

SEQ ID NO: 22722 - DNA, 2646 bp, Homo Sapiens
  misc_feature (2300)..(2300): n is a, c, g, or t
atgaagcggaaaagcgagcggcggtcgagctgggccgccgcgcccccctgctcgcggcgctgctcgtcgacctcgccgggtgtgaagaagatccgcagctccacgcagcaagacccgcgccgccgggacccccaggacgacgtgtacctggacatcaccgatcgcctttgttttgccattctctacagcagaccaaagagtgcatcaaatgtacattatttcagcatagataatgaacttgaatatgagaacttctacgcagattttggaccactcaatctggcaatggtttacagatattgttgcaagatcaataagaaattaaagtccattacaatgttaaggaagaaaattgttcattttactggctctgatcagagaaaacaagcaaatgctgccttccttgttggatgctacatggttatatatttggggagaaccccagaagaagcatatagaatattaatctttggagagacatcctatattcctttcagagatgctgcctatggaagttgcaatttctacattacacttcttgactgttttcatgcagtaaagaaggcaatgcagtatggcttccttaatttcaactcatttaaccttgatgaatatgaacactatgaaaaagcagaaaatggagatttaaattggataataccagaccgatttattgccttctgtggacctcattcaagagccagacttgaaagtggttaccaccaacattctcctgagacttatattcaatattttaagaatcacaatgttactaccattattcgtctgaataaaaggatgtatgatgccaaacgctttacggatgctggcttcgatcaccatgatcttttctttgcggatggcagcacccctactgatgccattgtcaaagaattcctagatatctgtgaaaatgctgagggtgccattgcagtacattgcaaagctggccttggtcgcacgggcactctgatagcctgctacatcatgaagcattacaggatgacagcagccgagaccattgcgtgggtcaggatctgcagacctggctcggtgattgggcctcagcagcagtttttggtgatgaagcaaaccaacctctggctggaaggggactattttcgtcagaagttaaaggggcaggagaatggacaacacagagcagccttctccaaacttctctctggcgttgatgacatttccataaatggggtcgagaatcaagatcagcaagaacccgaaccgtacagtgatgatgacgaaatcaatggagtgacacaaggtgatagacttcgggccttgaaaagcagaagacaatccaaaacaaacgctattcctctcactctctccatttcaaggactaaaacagtcttgcgttaagtaaaaacctgtgaccagagctgaaggaagactctaggactgaaaactgcaacagaaattagcacaatttgaaaacaaaacaaaattgcaaaagccttagttgctttttccacctaagaagttgatcaatggagaaaatgtccactggagtttgaataatgaactttgagtttgggtgcaagcaaatgactcagagaagggtccagctctcaagctgaatgacaaacatgctgttgtaaatttagtctcaggtgtaaatacccaagccctctggtacccagggagctggctggtctgtggtgcatgtgtgtccctgtgatggcaatcattgtagttgctggccttcagaagaattgaggatctgatggaggttttttatgtatttattttctgttcaccttgtgaccctgtgtcaaaatttataaagatacaaaaggcattactgaaatggtactttctgtaatttgatactatttggcttaatcatcttcacttgactatttgtaatactgttgtaatgttaactctgttaagtacccaagctgcttgtcttccaccaaagagtgctttattaacaagaatctgtgaaaatcacatttaaacactgttgcatgttgtaagaccaggtggtaccttagtaacctaaaacttgcaagagaatattaatggtagctttagaagactcaggaggagaaactgacttcagagttggaagatgttgcaagtcgttcctttttctgtccttcagggactgaagaactgggaggctgcccattgtttggttgccagtcatacaaattaaaatcatatttccttccatgaatggaagaaacacactattggtttttccccttggaaacagcaatcccaaataatgtcggcttacaaaaaaaaaagttaccacttttttagagtccttnccctgtaacattggatttttttttcccttatgagatccacctaaggccattgacgtggcctgcgatctcagtgacaatgatctgctttctggatctcactgttgcctttggttagggaacacagagtgcttctcccgcagccctactggaacacagcagagtctgtgccatgaagcagttacagaaacagaattgatgtgctgctaaaaaaaaaaaaaaaaatggggcccgggggggcgtccgccggccctgcgggccgccggtgaaataccactactctgatcgttttttcactgacccggtgaggcgggggggcgagccccgaggggctctcgcttctggcgcg

SEQ ID NO: 22723 - DNA, 75270 bp, Homo Sapiens
tcccagggtcccgggttgggggggtggagcagcatttcgtcgccgcgggggtgccgggactccggccgcagtgtcgccgccatcacggacttcctgtgggacaagcgcacgggcctcgccgccagaacggtgagcgcgcgggttggctggccgcgcgaaaagatggcgaccgcggggcgggcggggttaggcttgggttgggggcaagggacgggggcgagatttggagaggaggagagttgagacctacgaagcgacggagtagggagatgagggggaaggaggtcggcctgcgttagatgtaccaagaagacctgtaggaagcttgggcggaaccagactagaagggatgatagagtaaggatgggagtggttccagagatgtgaaggagtggaatatcaaagttggactcgggtccaatcaaagctggaggggaggaatacatcaccgtgtcacttggaacatgcaggaagaatttgcctgtaggagttctggattttctgagtaagaaaggaaaaagcaaaagatttcaaacttgagaaaggtaggctagtgatgttttgaggggacagtgctgtgaggccgtttgatggtagtatgtggtgagatggcatttatgtggctatgctgattaggataactatgctgggaaaatcttgtgcttgcagcttggtatgctaccggccccagttacaccaagaatgcatcaaataccaccctcctcaatttggggaggttgggaagaagtgtatacagaatggtggtcagacatcggaatcattaaaccttttgcatacgcgattctcatacacccccaccaagacttatgtccctgggcctgtttcattttattgtgccttcctattctcatcttcctggattgtgacagtgatttttctcttttttccttgaaggaaaaaaaggatttgtgaaccatcccattccaattccattaactggaaggtggccagctgtcagctaagtagggctgatattaattaaaaaccacttactggccaggcgcggtggctcacatctgtaatcccagcactttgggaggccaaggcgggcggatcacctgaggttgggagttcgagaccagcctgaccaacatggagaaaccctgtctctactaaaaatacaaaattagctgggcgtggcggcgcatgcctgtaatcccagctactcgggaggctgaggcaggagaatcgcttgaaccctgcaggcggaggttatggtgagccgagattgcgccattgcactccagcctgggcaacaagagcaaaactccgttttcaaaaaaaaaaaaaaaaacacaagaaacagttgttatctacgtcttaagcacaagagtggaggggccagatgggatgctgactgtattttgtggcctactacattaaaacctctcaagggagagttggccaaagatgtgagagatgattaagttaattcaaggggcccgacccagatccctggagctgatagtatttggcgtttacctggtatatgtagaaacctgggagactggattcctaccctcaggacactgatagtctacttgaggagatgagatgtactcttaatgagtgtacaacatttatcataactgtaaaccaaagctttactctattgacttgtgaggaactcagcatcacacagatctatatcttagatcctgaacggggatacactgtggcagtctccatcggtcgtcatacactttgctctgtagtgaactgtgtcctagacctgaaggtcttcatggagctgtgtttgaagaaaataaggatagaacacttgaactggctgggtgcggtggctcacgcctgtaatcccagcactttgggaggccgaggcaggaggatcacgagtcaggagtttgagaccatcctggccaacatggtgaaaccccgtctctactaaaaatataaaaattagccaggagtggtggtgcgtgcctgtaatcccagctacacaggaggctgaggcaggagagttgcttgaacctgggaagtggaggttgcagtgagccgagattgtgccactgcactccagcctggccacacagcgagactctgtctcaagaataaaataagaacacttgaactgaggggtgggtaatgagggatgggtttgggggctttctagagtttcagccagagttagtaggtggctgtactccaataaggaggaattgtaagtacagaggaagactgaggaagttgtgcctggtaaaaagaggcagaaataagaggggaaagcagcttagcatctttggagcagccagtccttggaggagatttctgaaaactcgaaactttcctatttccgctttcccttgccttccagatgccgcatcctcgaaggtaccactcctcagagcgaggcagccgggggagttaccgtgaacactatcggagccgaaagcataagcgacgaagaagtcgctcctggtcaagtagtagtgaccggacacgacggcgtcggcgagaggacagctaccatgtccgttctcgaaggtgaggcctcaggaagagatactcaaacacagggtcactcgctcattcctttgttcaacaaatacttattggttatatgctaaaaccattgccttaagtagctggctgaaggtaatgtcgggatagataaccacagaagccatttgggctgcagtgttaagtgttagaatacataatgaggaactgaggacgtacccagtgcgtttggttggagtggggcaggatgttaattcagataaaacattgcagaaagcaacatctgtatatgtctggaggacaagtagagtcaggtgggggaagtgtctttgggcagagggaaagcatgtgcaaaggactgggagctacaggtaactaataagctaacagataagacaaagttagatctttgtgtttttaattttttaaaaattttaaaatatcatttatttatttttgagacagagtttcactctgttgcccaggctggagtgcagtggcaagatctcagctcactgcaaactctatggccccaggttcaagttgattcttgtgcctcagcctcccaagttacctgggactacaggcatgcgccatcatgcctggctaattttttttttttttttttgtatttttagtagagacaggatttcaccatgttggcctcaaactcctgacctcaagtgctccacctgccttggcctcccaaagtgctgggattacaggcgtgagccactgtgcccggcccagttttaatattttagtggtatgttcagtggaaagaatgggttaaggatggtttagagcaaggggggatttcattcaggaaagcttgagaaaaaaatggctctttgtttctttgtatcactgcagcgggaaaaaggccccaatagggagtggttctgcagatgccttttcagaggttttggtgacatggcagatgtgcttggttaacctcaacttcttctggtcccttggtcctctccagtgactcaaacaagtgtctgagaacagtttttcttagcattcactctttgtcctcactaaggcaggaccttgtcacagggtatggtagggaatgtgatctgaacagatacacctcattggtatttgttatccaacagcagttatgatgatcgttcgtccgaccggagggtgtatgaccggcgatactgtggcagctacagacgcaacgattatagccgggatcggggagatgcctactatgacacagactatcggcattcctatgaatatcagcgggagaacagcagttaccgcagccagcgcagcagccggaggaagcacagacggcggaggaggcgcagccggacatttagccgctcatcttcggtgagtgccagcccaggcccttcctctccccactcttctgcaggccctctaggactctggtaagtgagcagtatccttgttctcagctgaacattggggcatgaacactgaggtgggcactgagtttgcctactttcttggaagctctccgactcttgaagggccctggatctgctttggagatggatgggcacggagcatttgtgacccccagtgctctccctggcatgttgggcttattgtgttgggagcagcttctccgccccagcggcctccactctttaatggggaccttgcttgttgaactgcctttttcccccaagccctgggctctgtagcccccttggcaggcgggcttgggtgggggcaaggggagatctgtgtctgcccggaagggcattgtgtagagcatggggttgtgggtgacattggcaacaacaccacttctctgctctgcccatgcctctccctgttcctgttttgggtttggggacttgggattatgcgccgctctctcttctcacaccgatccaccttactgcatctgacgtgttcccttccactgtcccccatcatcgtctgtcccccctggctgggcgcctgtgaccggtgacccctctaccacccaccccgcctccctccggcccccggctccgaacactgggcttggttcggaaccccccctgccccccgacagcagcacagcagccggagagccaagagtgtagaggacgacgctgagggccacctcatctaccacgtcggggactggctacaagagcgatgtacaagccaaatcgtaacaatcctatagcctgtaatggtcccatagccatcctaacgtcccaagccaacctgagtcacagcctcttgccttttgctcagtggtgttgtttatctgggtggtttgagttgctgttgagaattgacctctgttgtccactcccagctctcacggcccctgggttaaaggtggtgggaatcacgcaggggttttcttcccctgtgaccatctgtatctgttccccttccttcatctccaccccaggttgctgtccccttttttcttccaactcagctcattccccaccttctctccctccctctccccgaccctgctctctttcatttcagatgaaatcgttagcaccttaggagaggggaccttcggccgagttgtacaatgtgttgaccatcgcaggtaactgtcagtccctccctactatgtggggctaaagagatggttggggttatatggggcttttttgctaattaacctgaggtagaatttcttagtccccctacagccctgttcattttgagacattcttgagaacccagcaaaagcctctcctgccaacttacaggggtggggctcgagttgccctgaagatcattaagaatgtggagaagtacaaggaagcagctcgacttgagatcaacgtgctagagaaaatcaatgagaaagaccctgacaacaagaagtaagcaagcaaggaagtgtgtagggaggctgagagccccaacccctacacgggagagattcctagacctggtttaggcagacagggggagtcctagaccttctcatccattcatcttttgttcatcatcttagagtagtagaacatcagggtaggaaagggggggggcccatgacattccttaatccactccccttgttttcagggaagttagattgctctgtcgtttgaccccagcctagaatggcttctgtagagatataccctggacatagccctaggactgagcatcaacctcatcgaacaatgaattaagcttttataagtagaactatgctgataaggccacagacatttatgcagtaatattttgttcacatacattcacagtccaaaaatagaataaggactttaagccaagatatgaggccagtaggtataaataggagcccagtggtagctagtggtgaatgaatatcaggagttgggctggggtttgggatttaggatggacagtttgatgattccaggatctatactgtttggagcttggcactccacagctcttccagcaaatagtttttgaactatttaaaatgacgcaggaagatattttgaaacttgggctgggcatggtggctcacgcctgtaatcccagcactttggaggccgaggcgggtggatcacaatgtcaggagttcgagaccagcctggccaatatggtgaaaccccgtctgtactaaaaataaaaaaattagccgggcatggtggtggacaactgtagtcccagctacttggaaggctgaggcaggagaatcgcttgaacaggaggcagaggttgcagtgagccaagatcgcgccactgcactccagcctgggtgacagagtgagacgccatctcaaaaacaaaaaagaaaaaaacatggcagatagtaccatttctttcttgggtctggtagaggctactccttagctgaactgaattttggtgttagtactagctggcatggttttacacaagttatgtggaatcaacagctatgaagtacctccttgttggatggctgatgggcagatgggagctcatcagacaatcccccttcccccatctctcttctcagcctctgtgtccagatgtttgactggtttgactaccatggccacatgtgtatctcctttgagcttctgggccttagcaccttcgatttcctcaaagacaacaactacctgccctaccccatccaccaagtgcgccacatggccttccagctgtgccaggctgtcaagtgtgagtggggtgggccgaagtggactctggggcagtccctcccttcattggatctcttctgtcggttgtgcactggtgaagcccctaaacagtcagctgtctgttatctgcagttctttgatttactgtcatcttgaaacgtcttctgacttaactccttgactgatgtctttatcgtcactgattgctcttactctacacctagcctagcagcagctagaagagaaagcctttggaatcaaagcacttaattaccctccccttttcctttctccctttcttgggaaagcatcagtcagacagcaaacataaagagacaaaaatacactccttagggtaaaggcttacatttgtctgggatgagatgttcattcacagcaaaggagatgggaacacagagtatgtagttcagctaaggggcaaggtggggaattcaaagaaatatatcattcctctggagtcatcaaaataatacagtttcacagaattgagttaacataatgccagctagacacatgtcaaagtgtgtacacactacaactcaaagcaaactttttttttttttacatcagttgagctacatatgtatcttacattagaaagagcagagcttcttagaccaggcattccatttagacgtagagcggaaagcagccctagtgattctggacctgtctcctcactggctttgccctaggtaaccaggcctggggtcagctgataccagttagctctggccacctgcaccaagcctgacctggccttctcccctacagtcctccatgataacaagctgacacatacagacctcaagcctgaaaatattctgtttgtgaattcagactatgagctcacctacaacctagagaaggtaagatggatagggtctgcccttggttactgggggcaggcagctgcaccactttgccttctgccgagccctttgttttctcccttttatttcgtcctcccacattttctccctgactggctccaactgggtaaaactaaataggttgaaagggagaaatctcttaagaagacttaaattgggagataacttgtacaggggacttcagataactttccagtagagtgaaagtttttaaggttcttggtttgggctttatttatttatttatttatttatttatttatttatttgagacagagtctcactctgttgcccagactgatgtgcagtggcataatctcggctcactgcaacctctacctcccaggtttaagtgattctcctgcctcagcctctggagtagctggggttacaggcacccgccaccacgcctggctagtttttgtgtttttagtagagatggggttttgccatgttggccaggctggtctcgaacccctaacctcaggtgatctgcctgtctcgggctcccagaatgctgggattacgggtgtgagccacagtgcctggcccggacttcttttttgagatgtgtatttctgtgaggtaggaaagctcggctcctttgactaactggagataatgaagatctcagacctaaagaagctctccctcctttgacccctttgctacatgttacatatttttagagaaactcctttgctacatgttacattttttcagaaaaacccatttgctacatgttacattttttcagaaaaacccatttgctacatgttacatgttttcagaataactatatatctggcacttgagtgtagtcttcagatgcttacagatgtgcacgctgttctataatcatttcttaatccttttgctcccctacttctaaaagtattatgctggatgtggtggaagctgtaaaacaggaatttcccaggcttgtaaggccaggcaggagatcacagtaccttttttaaggctcagaagcaatgtagagaatactggtggaatctcagtctgggtgcagaggttcatcctctttctcctctgctcctagaagcgagatgagcgcagtgtgaagagcacagctgtgcgggtggtagactttggcagtgccacctttgaccatgagcaccatagcaccattgtctccactcgccattaccgagcaccagaagtcatccttggtaagggagggcaaggctgtccaagtgtgtgagatgatgtgagggtggggccacctaagcctcataacaccttttccctcccattctcacccagagttgggctggtcacagccttgtgatgtgtggagtataggctgcatcatctttgaatactatgtgggattcaccctcttccaggtaagtgatgggatgtcttacttgactgcctggcattcttctacctggttcctttgttttctgctgaggacctgcctactcagttctccacattgcctgccttcctggcagctgatccttagcatgcccttttcagtcccatgctcagtttctgtttttgtttcccagacccatgacaacagagagcatctagccatgatggaaaggatcttgggtcctatcccttcccggatgatccgaaagacaaggtgaaccttgagggggcactagttaactcttttccttttctctccacagaattggtctatttcacatcattttcttttttctttgatacctcctctccccccagttactttcagatggggaaataagggaattgtaacaagggtgaccttctgattcctcaacctccccttcccctctagaaagcagaaatatttttaccggggtcgcctggattgggatgagaacacatcagctgggcgctatgttcgtgagaactgcaaaccgctgcgggtgagctgggctcgggataaatagtgcccaccgtccagaagtcacttccttcttagggtggttgccccctggaatgctcttcaacaagccagagggttaggaaaggaggggaggaaagctgaaagaagacatctttggtcaacagaggaaacataagagggagtggttttgcggagggaaggaggttagacagcctaaccttgagacaaccagagatcaaagcaatgtcctggattctttaggtcagacagaaaagaataaactacccttgaagagcttacattttaatgaggaactaaagaagattcatgaagttgacaaggatatacaagtagaaagaactttcaaagattatggagtaattgtgctagagggaaggtaggttgagctataatatcagaaacgttggtcctggtgtggtcgtggttaggtagccttcaaattggttgcaagcagagccttggttctccaagaatgaaaggtagggtcttgaagaaggcagggtttgtaaggcatcctgcctcacctttttcctgccctcctccaccagcggtatctgacctcagaggcagaggaacaccaccagctcttcgatctgattgaaagcatgctagagtatgaaccagctaagcggctgaccttgggtgaagcccttcagcatcctttcttcgcccgccttcgggctgagccgcccaacaagttgtgggactccagtcgggatatcagtcggtgacgatcaggccctgggcccccctgcatcttttatagcagtgggtgtccagtccaggacactggtgcttttttatacaagagaacgagccagagttcactccttcctcctggctctctatatacctgtgaatatgtgaaatagtgtaaatatgaaagaacttgtacctatcacttcaacccctgccttgtacataatactattccatccacacagtttccaccctcacctgccccctcatacggagttggatgggggccgagtgaggtaaccaggtggcatctaccccatgttttataaggaattttgtacagtctttgtgaaataaaataacgtgcttcatttgacccccatccctggagttggaggtttgggaatgctggggtggagggatgaaactattggcaaactttctgagtttgggtatgaagggagtcctccttaccctccaaaatgaagcacagccaggctaccatttatttcccctgtccaccttatcatatgggagggtagtgatgggtggggcagcatttctttcagattaaaacagagaagtgttatgaggtggcacttctcggatgtggaattatgagagttgggaagatctgactcctagagtcattaggccgcggcccagtatagagccagaaactcaggttgaaaacgtgctcaacctggctcctaggggggattgccaggaccggtcagaaggctcccgtcgtccatctcgggagactaggaaggccggattcctacgcgaggcctgctgggaagtgtagttcgttagtggaaggaagtcacatggaagaggggcggtagttggttgtgggcactgggttagaggtatcacgtgggggcactttcgtcttagcttttggacaagacgcaggcgcaaacccacggctgctgcgggggatccttgtggccctttccggtcggtggaaccaatccgtgcaacagagaagcggggcgaactgaggcgagtgaagtggactctgagggctaccgctaccgccactgctgcggcaggggcgtggagggcagagggccgcggaggccgcagttgcaaacatggctcagagcagagacggcggaaacccgttcgccgagcccagcgagcttgacaacccctttcaggtgacttgcgccagtcggcctcttttgggcggtcaggttgattcttcccggttctgtagggtcgggctaacttgtatccccatttgtgacatttgatcctgggaagagccgccacgtggggtgacagtgactccagaccagtgagcactctggggggcgggccctgccccttaatgggctggtgctggcagtgttggatgatggatttgaggtaaatgttgtcccagtcctgggacaacggcgtggccccgaaggtgcagtacttggagccacaggcagtttgggaatggtccctgggaattcccctaggtggcactgggtgccagctgagacccgggtctctgccctcaggacccagctgtgatccagcaccgacccagccggcagtatgccacgcgtgacgtctacaacccttttgagacccgggaggtgagctactggagagcataggagttcaaggaagggaagggtttgccagtgagacaagttagcttgggtacaggggacttttctgcatgcacaggaaggaagaggcactgtgatcttagttccctgagagaggctagtcagccatgggatgcctcatccttctagggccaccagggccaccaacccaaatggtttgagctctaaaagtcagtcctgggaagatctggaggctggcaaggccttaaccaatgttctgtatgggaaggctttcttgaagaaaataaaggttggggctggttggagtttaggttaggtgtgcagtttgaaagcaaggaatgaggaggactacacctgtttgtcccactggattagaagatggtgagttgtaagaatttaaggggttttcatggtacttaaaacttaaaaaaaaaagccaagcatggtgtgcatgcctgtaatcccacttgggaggctgaggtgggaggattgcttgagcccaggaatttgatggagaccatcctgggcaacagcgagacccccatctcttgagacgttttaaaaattggctaggtgtagtggcacatgcctgtagtccttgctacttgggaggctgggatggaaagactgcttgggcccaggagtttgaggcttcgatgagtgatgattgcaccactgcactccagcctgggtggcagagagacaaccccacactccatccccagaagaaaagagaaaaaaaaaacacagttaagtggggagatatggtaaatgagtgatttgagtcctcactaaggaattggatatgagggatgataaggctgctacaggtcatcatagagttctctgacagaaattcaacagaagaactagcttcctaacaaatgggggaaaggctgcttccttacatcatgagttctgggtctaaaggtattcaagcagactatagattcctgtgttatgagggactagatgatcactaaggtcttttcctcaacagccaccaccagcctatgagcctccagcccctgccccattgcctccaccctcagctccctccttgcagccctcgagaaagctcagccccacagaacctaagaactatggctcatacagcactcaggtacaggaggtgtgcaggtgagggctggggagaagggccagtcctggggcccagggctcacatctccgtctgctcacactgggcaggcctcagctgcagcagccacagctgagctgctgaagaaacaggaggagctcaaccggaaggcagaggagttggaccgaagggagcgagagctgcagcatgctgccctggggggcacagctagtaagtaatagagtggggaagagcatctgagagtttgggaggagcaaaaacaggtcttaagggcctgggctcggctgggtgcggtggctcacacctataatcccagcactttgggaggctgaggtgggcggatcacgaggtcacgaggtcaagaaatcgagaccatcctagccaacatggtgaaaccctgtgtctactaaaaatacacacacacaaaaattagctgggcatggtggcgcgcacctgtagtcccagctactcgggaggctgaggcagggagaatcgcttgaacccgggaggtggaggttgcagtgatccgaaatacgcgccactgcactccagcctggtgacagaaatgagactccatctcaaaaaaaaaaaaacacaaacctgggctctggagtcagactgctgagtttgaattttagagatactgcttactaaccatgagcttttagggaagttacttaatcttgaatgcctcagtttccctatttataaaatgaaaaccacgtttgcatccgtttgacagggttgttgtgaaggttaaacaaaatatatgtgaagtacttggtacagtgcttagatgttttaaataataataaacagtattaatttttccactctcacttgtctccttggaccccaaattggagataaaagagaggatccagggctgggtatggtgcctcacgcctgtaattccaacactttgggaggccgaggcaggcaggttgcttgagttcaggagttagagaccaacctggacaacatagtgagatcctgcctccaaaacattaatgaaaaaaattagcagggcatgatgtacctgtctgtagtcctagctcctcaagaagctgaggtggacggccaggcgccggggctcatgcctgtaatcccagcactctgggaggccaaggcgggtggatcacctgaggtcaggagttcaggaccagccaacatggtgaaaccctgtctctactaaaaatacaaaaattagctgggcgtggtggcatgtgcccataatcccagctactcaggagactgaggcaggagaattacttgaacccgggaggcggagattgcactgagccaagatcacaccactgcactccaacctgggcaacaagagcgaaactctatctcaggagaaaaaaaaaaaaaaaaaaaagctgaggtgggagggttgcttgagcccaggaggttgaggctacagtgaaccatgatcataccactaccttccagcctgaacaacagagaccctatctcaaaaaaaaaaaaaaaaaaaaaagagaggatccagggatggagagaagggggagtgattcctttgttggtctctgttttacttctggggtccacctgttttttggcgccttacagctcgacagaacaattggccccctctaccttctttttgtccagttcagccctgctttttccaggacatctccatggagatcccccaagaatttcagaagactgtatccaccatgtactacctctggatgtgtgagtagtgagaagccttttggaggaagttacaggtagatctcttaactgccctggggtccgctcaccaagaaccaaacacttcacctctatttagaactcaccagcctgctagcaaatgttcttgccctctccccactttttattgtccatatgcaggaatatattttgaattctttagatgtctttgggctgggtgcagtggtatacgcctgtaatcccagcactttgggaagctgaggtgggtggataacctgaggtcagaagtttgagactagcctgatcaacatggagaaaccccatctctactaaaaatacaaaattacctgggcgtggtggcacatgcctgtaatcctagctactcaggaggctgaagcaggagaatcacttgaacccgggaagtggaggttgcaatgagccaagatcatgccattgcactccagcctgggcaacaagagcaaaactccatctcaaaaaaaaaaaaaaaaaaaaaaaaaaaaaaaaaaaggccgggcacggtggctcacacctgtaatcccagcactttgggaggcccaggtgggcagaacatgaggttaggagatcaacaccatcctggctaacacggtgaaaccccgtctctactacaaatacaaaaaattagccgggcgtggtggcgggtgcctgtagtcccagctacttaggaggctgaggtaggagaatgggcgtgaacccaggaggcagagcttgcagtgagccgagatcctgccactgcactccagcctgggcgacagagcgagattccatctcaaaaaaaaaaaaagaaaaaaaaaaattagctgggcgtggtggcgggcgcctgtagtcccagctactctggaggctgaggcaggagaatggcgtgaaccggggaggcggagcttgcagtaagctgagattgcgccactgcactccagcctgcgcgacagagccagactccgtctcaaaaaaaaaaatgtctttgcaaggggatcacacattattgacatttgctttctccatctcccctgttgaggattccatgaaggcagcagctgccttcatttccttactctgccatgtttggtgaatattataggatgagcatagatgggaaggagccttcattgcagtccagaagggctcctcatcctgtccctctgccccttaggcagcacgctggctcttctcctgaacttcctcgcctgcctggccagcttctgtgtggaaaccaacaatggcgcaggctttgggctttctatcctctgggtcctccttttcactccctgctcctttgtctgctggtaccgccccatgtataaggctttccggtaagtgtgttagtggtgggagagtgatggagacctgggatgggccccacgtctgcccatccttcagctctaattcttctcccaccctccccatttttttcctctttgtaggagtgacagttcattcaatttcttcgctttcttcttcaatttcttcgaccaggatgtgctctttgtcctccaggccattggtatcccaggttggggattcaggtttgtgaggctgttatccaccctcacctttccctctagatccagccagcactgggtgctggataggagttgttcagaaaaaggaaatgtggttttaatccttgggaggtactagtttaatgagatacaagacatacttccaggatagagcgcagacagcactcttgacacatatagattgaagggaagaatgctgcatttggccaatctaaggtggcttcctggaggaggcatagaaccatggttgaaaggaggaagaagaatccccagatgagtgcctggaagagcttggagagctcagggctaatggttcagaaactggaattaaactatgaagagattagatacagtttgggattgtggtgcttggaatgctgctcgattgacagggagccactgctgatgggaagggtaggaacaggggatgctggtgacataaccagtggagaagctgaggagcccctcttcactggtacatccttccctttacagtggctggatctctgctctggtggtgccgaagggcaacacagcagtatccgtgctcatgctgctggtcgccctgctcttcactggcattgctgtgctaggaattgtcatgctgaaacgggtgagggctgtgtcgaaggtggggccgggatggtgagatcatgggtccccaggggcgtgggtggaacattcaggagcaactggcacaggtcaggctgctgggttgttctcagctaatggacctctggggtgtgtgtttctgtgtgtgagtgtgtgtgctgggcagcaggctgctgagtggtagtgatgctgttaggctgggggtggggaaccagtggctggaatgggcggtaatgtctttgtcctctacttgcagatccactccttataccgccgcacaggtgccagctttcagaaggcccagcaagaatttgctgctggtgtcttctccaaccctgcggtgcgaacccgagctgccaatgcagccgctggggctgctgaaaatgccttccgggccccgtgacccctgactgggatgccctggccctgctacttgagggagctgacttagctcccgtccctaaggtctctgggacttggagagacatcactaactgatggctcctccgtagtgctcccaatcctatggccatgactgctgaacctgacaggcgtgtggggagttcactgtgacctagtccccccatcaggccacactgctgccacctctcacacgccccaacccagcttccctctgctgtgccacggctgttgcttcggttatttaaataaaaagaaagaggaactggaactgacatccccgtttcctgaatcttcattgggaattaggccttatgaaagagaaaggagagtgtggagtgaggtgggaaggtcggacccggctttagtgtaaactgggagagagatgaggggcggggcggtggagcccgagtggctggcgcaggaaggaggtgggaagtccacggaaacgcgaaacccggagacgccagggagccctgctccccacccctctccattaatgacggggaagagccaccgcctctgccgggaacgccaaggaatacgcgggcctggagcctgaaaagctggatggggctcaagtggaggcccaaaggatcactagcagcctagccagggtccagagcgaggcagggactggaggagcgcttatccgactgcctcgccctgccgcgggatcccccaaccccgacagggtctcagtcccgaactacaactcccggggtgcaccgcgccggccctcgccgccatgcccctccttcccgcaccatccccattcccatcccccttctctagtccccgacctgcggcagccggagctcggggagcggagcgtggtggggaggggagcgggacaggcgacacaggagacagcggcgccgcggcctctccccaccaggcggccccggatcctactggacgccctgagggcacaccgaccgcgcctctagagtcaccccacgccgacccctcccctcttctctagacttatttccatccttcccgcttttaccctccccacccgtccctgggctccaggccgccgccccctcctcactcctggaccggcccttctcggtgcccctcttccctagggagatgcgatgagccggtgcccccgcgtcctcatcgtcgccccgggcacggtgcccgtccagtgcccgtggtggggagggagcactccgcggtccctccgtgacgcccctcgcttggccccccccacagctggcgtccctcggccatgccccaggggacccagccagggggtgggctctagagcgagtggggtggagaggagaaaggacggggccttgggggcctctgagatgctcccaagtgccagggagggccgagcgaggcgcaggcaaccgggcagcaggcatgatgccctcgcctagtgactccagccgctcgctgaccagccggcccagcaccaggggccttacccacctccgcctccaccgaccctggctgcaggccctgcttacgctggggctggtccaagtgctcctgggcatcctggtggtcaccttcagcatggtggcctcttccgtcaccaccaccgagagcatcaagaggtcctgcccgtcttgggctgggttctcggtgagttgggtgcacagttgttgggtgggggaggctcctcgggccccaccctccacaccagctgcaagtccacatgcttgcctctcctccctctcctggtcctctgcctccttacagggctgggtgcatcctgtggtgaggggctcactcaggagcctccccctgccaggctgagcctgtgcccactctgtccccagctggcgttctccggggtggttggcattgtgtcctggaagcggccattcactctagtggtaggtgccagggtccagtgcccactgggaggcaggtgcccagcacgcaaggggaagcccatttatgacctcaagaagggaactggctccccagttggtgccagccgggtgggcacgaagttctgtgaaggagggggactctgtccgtggcagaggagtactcatgagggtcccagccctgagtctgcaccctgttttccccagatctccttcttctccttgctttcggtgctctgtgtcatgcttagcatggctggctctgttctctcctgtaagaatgctcaactggcccgagacttccaacagtgctctctggtgagatttgaggagggagagctggaaagaactggctgggggaggtgtgcaggacacctcagtttgtgctgactcaggctgcctcaccctccctgctccactcaggaaggaaaggtctgtgtgtgctgtccctctgttcccctcctccggccctgtccagagtcggggcaggaactgaaagttgcccctaactccacctgtgatgaagcccgaggggccctcaaggtgagcttgcaccctgcaaacatcctcctggttctcactcttgcctcccctgctggggatctcacaggcccataatgtgtggaacttagccgtctcctgactcctctcctcctttcccttccccagaacctgctcttcagcgtctgtgggctcaccatttgtgccgctataatctgtacactctctgctattgtctgctgcatccaaatcttctccctggacctcgtgcatacggtgagaagggagcaggggccagggcacgcaggtatggtgggggcaggggtgtgtgtgctgagacttgcctgagggaacaatggctacagatctggcttttgagcaccaggggctatgggttatctattatcctcatctattggaggaatggatgtttagtggggaggatgagaaggggagatggcagggagtgagttaagtatgtgatgctggtctgggaccaggagagggtgctttagagaatgggactggatggtggggtagagtcaagaaggtcctatgctgggcacggtggctcattcctgtaatcccagcactttgagaggcccaggcaggcggatcacctgaggccaggagttcaagacccacctggccaacatggcgaaaccctgtctctattaaaaatacaaaaatcgggccgggcgcagtggctcgtgcctataatcccagcactttgggaggctgaggagggcagatcacctgagatcaggagatcgagactatcctggctaacatggtgaaaccccatctctactaaacatacaaaaaattagccaggcgtggtggcgggcgcctgtggtcccagctactcgggaggctgaggcaggagaatggcatgaacctgggaggcagagcttgcagtgagctgagatagtgccactgcactccagcctgggcgacagagcaagactccatctcaaaaaacaaacaaacgaaatacaaaaattagccaagtgtggtggcgggtgcctgtaatcccagctacttgggagtctgaggcaggaaaattgcttgaaccggggagtcagaggctgcagtgagctgagatggtgccactgcattccagcctgggcgacaagagcacagactccgtctcaaaaaaaaaaaaaaaaaaaaaaaaaaaatatatatatatatatatatatatatatatatacacacaaaattacaaaaattaggctgggctccgtggctcatgcctgtaatcccagcactttgggaggccaaggcaggaggatcaccagatatcaggagtttgacaccagcctggccaacatggcgaaaccctatctctactaaaaatacaaaaattatccgggtgtggtggcgggtgcctgtaatcccagctactcggaagactgaggctggagaatcgcttgaacctgggaggcagaggttgcagtgagctgagatgtagccattgtactccagcctgggcgacaagagtgaaacttcgtctcgaaataataataataataataattagctgggcatggttgcacacccttataattcctgctactcaggaggatgaggcatgggaattgcttgatcttgggaggtgggggttgcagtgagctgagatcgcgccactgcactccagcaacagagtcagactctgtctcaaaaaaaaaaagaaggtcctagatggaggtgaggctaaagggtggacattcctgtgaagacacagaatgtgtggagcttctggatggaggtggggccataaagaggaatttgtgggtgggcagggccagaggctagaggtacagggtgacggtggggttaaggagagctgattttgggtgagggaggggccagaataagagcttctctcaggggatagggccagaaaaaataatgtagatgagagaggagtttggggcccaggaggagctgtattcccagaatccagacttgctgacctgctcgcttccccagcagctggcccctgagcggtcagtctcaggcccactgggacctctgggctgcacgtccccgcccccagcccctctcctacacaccatgctggacctggaggaatttgtcccgcctgtgcccccaccgccctactatcccccagagtatacctgcagctcagaaacagatgcacagaggtaaggcctggtggggtcttgctgggggagctaaggaaggggactggggctgggcctggattgctggagagagggatctttgtggagggggaattatttctcctacattgaccctcttcctcatctgccagcatcacgtacaatggctccatggacagcccagtgcccttgtaccctaccgattgccccccttcttatgaggcagtcatgggactacgaggagacagccaggtgagagcacagcacggcttggggcgggctggggagccgggttgtagcctggaaagctgaacaggctgtagcctctggataaagatagtaacagtggtcaaggtctttacagcaccagcatgcccactgttgcctttgatcttccctagagcctggtgaggtgagtgggttggaagctatcatttctgccatacagacgtggaagctgaggctgcacaattaagtgacttgtacaaagggacaaggctggtctggaatctaagtctccagagctctgtctagcacatgggggtgttcagtgtgtagggctgaacccttgaccctgtgtcttctgcaggccactctctttgaccctcagcttcacgatggctcgtgcatctgtgaacgagtggcctccattgtagacggtgagcagggcgtaatgaggggtggacaagggcggggctgccagggatagctggggtgggtagagacaatagaaggggaaaacaaggcggagttggtggtttggggacataggagggctgtggcaacttggaaccctggacttatttttctcctctgagataaagctggaggcacagtggcccctagaggctgggcttgggagaagaggaactgcctgggcagggctaggccaggccaggctggtgctacacagcgccccctgccgcccacagtgtccatggacagcgggtctctggtgctgtcagccattggtgacctccctgggggctctagcccgtcggaggactcgtgcctgctggagctgcagggctccgtgcgctccgtggactacgttctctttcgctccatccagcgcagccgtgccggctactgcctcagcctggactgtggcctgcggggccccttcgaggaaagccccctgccacggcgccccccacgggctgcccgctcctattcctgctctgcccctgaagctccacccccactgggtgcccccacagctgcccgcagctgccaccggttggagggctggccgccctgggtgggaccctgcttccccgagctgaggcggcgggtcccccggggagggggccgcccagccgcagccccgcccacccgagccccgactcgtcgcttcagcgatagctcaggttccctcaccccaccggggcaccggcctcctcatccggcatccccaccaccgctgctgctgccacggtcccacagcgacccaggcatcacgacctccagtgacactggtgagccccctccccgactgcccaggctcaggagagggtaggcactgggagttaggtggccagtgatgcccaccaggattggggcacagttgaggtgggtgaggaggaagaaagggtgagttcactcctctggtagacattctcaggtactcacctcctagggacagaacatccatagcttagcagctaaaaaaggagaatttttttttttttttgagacggagtctctggctctgtcgcccaggctggagtgcagtggcatgatcttggctcactgcaacccgtttcccgggttcaagtgactctctcctgcttcagcctgccgagtagctgggactacaggtgtgcgccaccatgaccggctaatatttttttttttttttttttttgagacggtgtctcgctctgtcacccaggctggagtgcagccgcgcgatctgggctcactgcaactccgcctcccgggttcacgccattctcccccgggttcacgccattctccttcctcagcctcccgagtagtgagtagctgggactacagatgcctgccaccacgcccggctattttttgtatttttagtagagatggggtttcaccgtgttatccaggatggtctcaatctcctgacctcgtgatctgcccgcctcggcctcccaaagtgctgggattacaggcatgagtcaccgtgcccgggcaatttttgtattttttagtagagacaggtttcacccttttggccaggctggtcttgaactcctgacctcaagtgatccacccgcctcggcctcccaaaaggatttattttttgaaaccagttccacagctctcagcttggtccacttatctgtcctccccaagcttcagctgtcacttgttaacatgtataataatagtacttcacgccgggcacggtggcttgcacctgtaatcccagcactgtgggaagctgaggtgggtggatcacctaggtcgggagttcgagaccagcctggctaacatggtgaaaccctatctctactaaaaatacaaaaattagccaggtgtggtggagcgcgcctgtaattccagctactaacgagagaggctaaggcaggagaatcgcttgaacctggaaagcaggggttgccgtgagccaagatcatgccactgcactccagcctgggtgacagagacacactccatctcaaaaacacaaacaaacaaacaaaaaacatgtataataacagtacttcagccataggcattgtactcgaagatgctgagaaagaacagtggcgggcaaggctgttcacacctataatcccagcactttggaggccaaggcaggtggatcacctgaggtcaggagttcaagaccagcctagccaacatggtgaaacccccatctctactaaaaattgaaaaattagctgggcctggtggtggacgcctgtaatcccagctactagggaggctgaggcaggagaatcgcttgaacctgggaggcggaggttgcagtgagctgagatcgtaccactgcactccggcctgggcaacacagtgagactccatctcaaaaaaataagaaaggagatagtactggggaacgctcagcactgtgcgccaggtgctgaacaacaccactgcagtccttgttgtggtggattgtaccatctagttgctggctaatatggacagagatgctggccctttgattggggatggagcgtgggagctgtgaaagctcctctgggcttgagttcccacaggagggtgggcgtgtccacagaacacttccactcactccctgtctccctttctctcttctccccagctgacttcagggacctttataccaaagtgcttgaggaagaagctgcttctgtttcctctgcagatacaggtcaggcatgtggtttgcgccccagggatggggattgggcatggctgcccagccccctctccaccctacaataccattctcttatctctgtctctctgcagggctctgctctgaagcctgcctcttccgcctagcccgctgcccttcccccaagttgctacgtgcccggtcagccgagaaacggcgccctgtgcccaccttccaaaaagttcccctgccctcgggccctgcacctgcccactccctgggggacctaaagggcagctggccaggtcggggcctggtcactcgtttcctccagatatccaggaaagccccagaccccagtgggactggagctcatggacataagcaggtaggaattcggggagccaggaaagatgtttgggaaagcgtggagcttcagattgagccttattgatgatgccctttcttgtgtccctgtccaggtgccccggagcctgtggggccggcctggccgagagagcctccaccttcgcagctgcggagatctgagctctagctcttccctgcggcgtctcctgtctggccgcaggctggagcgtggtacccgcccccacagcctcagcctcaacgggggcagccgggagactgggctctgacctaggcttcttgtcacactgaacacatccagccacaggcaccagctggttgggaccagcagcccccagcatcctcttgcactggctggcacaaaaagaaacctgctgtataccccccaaagtgtccctttccctcctacctctggggtctcttgctgcttgcctctgctgctctggtctgggagagcttctgtcctgtgctgcatgggtatttagactgtgggggagatgccccttcttatagcactggaggaggaaaacaaattcttgtccccctcagaatgagagtggctctttctgatttgcaagggcactatggtcagggcaaaggcatggcccaggtgtttaagtacagggtgacgtgtgcctatgcaatggggtggtaaggcaggcacgaagagtccaaaaaatctaggtggcctctcagctctgccacctctagctgcatgaccttgggcaagctatgtaaccccaattgcctgctccattaaagactgtgaaggtagaatgtttgtaaagctcttaacagtatgtaagccttcaataaatttcagttttccccttgttttcttgatcattctctgtcaccagtgaaatttgttctagtgtctctcatatttaagaaaactctttcaggactgggtatggtggctcacacctataatcctagcactttgggaggccgaagcaagaggatcgcctgagcctaggaattcaagaccagcctgggcaacatagtgagaccctgtctctacaaaaaacaaaaaattagccaggcatggtgggacacgcctgtagtcccaactactcaggtggctaaggtgagaggatcacttgagcttgggaagtccaggctgcagtaagctgtgattgagccactgcactacagcctgggcaacagagcaagaccatgtctcaaaaaaaaaaaaaaaagaaaaaagaaactttcaagacactctttccaaccactaattgtaactctgctcctccttttcacagcaataggttttctttttcttccctccactgttaaacatccattctctcctcacccacccccatcagactccttcccctatctttccacagccactgctctgaccaaactttccagtgaccacagtggtgtcagacccagtgaccatttctctgcctgcatctcacttgacctcgaggcagcaattaatacccataatcagcatcttcttgaatttgtccctttgaaaagggaaatattggctcttctactttgtcctgctgaactgcttaacattggagggccccagggccctcacctaagccctctttcctacctccactctttctataggtggccctactactaaagtccatggctttaaataccatctttctatgtgttaatccatgactccagccttgacctcccatgagcgccatccaactcagcatgtctgcttggatgtctaatgggcatttcagattcaacatggccacaactgaactcttgattcccaccccagcaccggttatttttccactgttcccatctcaatggcacctccattacccatttgcacattccaaaagctcaggaaccatggtgacttcttttcccatatccaacacaaccaatcctatcctgaattcatccacatcccaccacctccccagctacctagctccagccatcctctctccacaacctctgaatcagtctttcacttttcccagcaatccattctccactcagcaaaatgatgataaagcacgtcacatcaaggctctgcctcaatttaatggcttcccattgtatttagaatcatctccaaactcccagagactatggtcgagctacaatctggcccaccttctgttccagccaaatttcctcacagcacaaggacgtttgcacctgctgttttgccaagcatgaaacccttggcccctatatctggtgctatcacctaatatcaggttttagctccattctcaccatttcagtgagcacccaatccccatcgcagtcattctatcacatagccatgtttttttttgtttgtttgtttcattttgtctttttttgagacagggtcttgctttgttacccaggctggagtgcagtggtgtgatttgggctcactgcaaccttccacctcctgggtcaagcaattctcctgcctcagcctcccgagtagctgggattacaggcgcccgtccccatgcccgcccagctaaattttgtatttttagaagagatagggtttcaccatgttggccaggcgggtctcaaactcctgacctcaagtaatccgcctgcctcggtctcccaaagtgctgggattacaggtgtgactcaccgcgcctggccacatacccatggtttcagcatgtatcactatctaaaattattatttttgtttatatatctgtgtcgtcccatagaaggttaaggtcccaagatcagaaacttgctcattgcagtgggtctaacactcagtaggtcctcaacaaacattcgttaagatactaaagtggcagggtggggccctgtaaacagcttcaggagcttcaggaccctgtgcttgtaggggcaacgtggtgccctccaaggaagacagggaggtgggaggagcactgcccagagatggcgtcaggctgcaagacttcttgaataattcagcatcataacaacccagcctcaggaagggatagggcacggccaggacgaaacattaggaggcgatggacaatgggattcccacggggcagcttctgcgcactggacgttccctaacctgaggctctctaaagaggaaggttaggaatcctctgagcttcggtgggctggactcactgtgggaattcaatcgcccccatccaccaacagtgtgctggcgggaaaacgccgacacgcatgcgtagttctcgcgccggctcctctctctctctctctctctctcgctcgctctctcgctctctcgctctctctcgctcgctctctcgctctcgctctctctctctctccggctcgccagcgacacttgttcgttcaacttgaccaatgagacttgaggaagggctctgagtcccgcctctgcatgagtgaccgtctcttttccaatccaggtccgcccgactccccagggctgcttttctcgcggctgcggtgatcggtcgggctgcatcctgccttcagagtcttactgcgcggggccccagtctccagtcccgcccaggcgcctttgcaggctgcggtgggatttcgttttgcctccggttggggctgctgtttctcttcgccgacggtaggcgtaatgaatatttcgacctttggatcttagctgtcccctccctgcgttcgcacttaacctttttcaccattattattattattgttattattattattttttgagggagtctcgccctgtcgcccaggctggagtgtaatggcgccttcttggctcactgcaacctccgcctcccgggttcaggcgattctccgacctcagcctcccaagtacgtgggattacaggcacccgccaccacgcacggctaattttttgtatcttttagtagagacggggtttcaccatgttggtcaggctggtctccaattcctgacctcgtgatccgcccgcctcggcctgccaaacagctgtgattataggcgtgagccaccgcgcccggccaaccatcattattatttttaacggtaaggatggtcagattttactaatgaagaagagattataaaatcttcaagtctttatatccacttgctttttgaggggtggagtgggaagaaggttatgtaattcatacgttcttcagagatgtgacaaacattcacggagccggacgacgtcgggttggattcgcactggagctgcagatgggtgccaggatggactggtccctaccctccgcttgaacctaggaggcggaggttgcagtgaaccgagatcgtgccactgcactccagcctgggtgacagagatactccgtctcaaaaaaaaaaacaaaacaaaaaacaagcggactgggcgcagtgcctcaccctgtaatcccagcactttgcaaagccaaggcgggaggatcctttgagtttaggagtttgagaccaacctgcgcaacacagtaagaccccgtctctacaaaaaatacagaaattagccaggtgtggtggtgtgcgcctatagtcccagctattctggaggctgaggtgggaggattgcttattctggaggcagaggttgcactgagccgaaatcaagctactacactccatccagggcaacatacggagaccctgtctcaaacaaacaaacaaaaaattgctcagtacctggccaaaaaagaagaggctcactatgcagaggggaagtggaaggagatgtttggacttctaaactcaatagagcaggagaggcaaatgtagaatgtgctcaggaaatatctgtgagatgaatgaacttgagggaagtaaggtactagatattacctgccctacccagaacaaatcctgtgcaatgtttccttgaaaagtgagaagtctggaaggggtggctactgacatagtgaagcaactagttcaattctacaacttgacagctaccctgtgccaggctatctacgaggatacttagaatgcataagacattccttcaaggaactccaggaacagaggcctgacatgttgcaatgtttagtgtcaagcagtgtactagagacacattatcacactcaaacctcacaacaattctgtgaggtaggagttatcactccccttttatagatgaaacagaggcttagagtgattgatttattgaaagtcaaacagccagtaaatggtgtagccaggattccaaacttgctgtctcactgagactgtacttaattactggagggaccgggtgtggtggctcattgctataatcccaacaccttgggaggctgaggctggtggatcacctgaggtcaggggttcgagaccagcctggccaacatggtgaaaccccatctctactaaaaatacaaaaattagctgggcatggtggtgggctcctgtaatcccagctactcaggaggctgaggcagggcaattgcttgagccgagatcacactgcactccagcctgggcaacagggcaagactctgtctcaaaaccaaaaaaaaaaaaattactggaggaacctagaagaagaaatgatcaattttgcttggagtgtatctagaaagacttcactgagatcatttaaagaacaaaaaggatggctggggtccaggcagtggctcatgcctgtaatcccagcactttcggataccaaggcagcagatcacctgaggtccagagtttcagaccagcctggccaacatagtgaaaccccatctctactaaaaataaaaaaattagctgagcatgttggagggcacctgtaatcccagctacttgggaggctgaggcaggagaatcactcgaacccaggaggtggaggttgcagtgagccaagatcacgccactgcactccagcctgggcaacagagtgagactctgtctcaaaaaacaacaacaacaaaaaatacaaacaagagacaagtagttcccaggtgcctaccaagtggtcaggcactgcacttacctcactgactgcagtaaccaccctttgaggttgtggcattgctccattttccaggcaaggaaatgggctgagagctgggattagtcaggtcatgactgtgtgtgccactcccgctaaatctcatttgatgtggttcatgaggccacaccatggacagcttcctccttgtgtccactgaggatatggctttgtacaacactttggtttttgaacgactttacaaacctccctgtcttgtgaggaaggaagaacagttattaccatctgcatctgatgatgaaacaagggacgctgcagaggagccgcactgaccactccctccctccagtcctgtcatcccactgccagtgtcccaccctcttgtgccctgcacttcactggctaataacccccctcactttttcctctgtgaagccatcctggataattccccacccacgaatggtccctcctcatctcagagagctctccatgcacacctgttaccgtttctgtctttatctgtaaatatctgtgtgtctgacttccatgcctcacacacctctatagggcaaagactgtcttaaacatcttggtagtgtcagtattttgcacagtgaagtttttttttttaaattatatcagctttatttgtacctttttgacatttctatcaaaaaagaagtgtgcctgctgtggttcccatcctctgggatttaggagcctctaccccattctccatgcaaatctgtgttctaggctcttcctaaagttgtcacccatacatgccctccagagttttatagggcatataatctgtaacagatgagaggaagccaattgccctttagaaatatggctgtgattgcctcacttcctgtgtcatgtgacgctcctagtcatcacatgacccatccacatcgggaagccggaattacttgcagggctaacctagtgcctatagctaaggcaggtacctgcatccttgtttttgtttagtggatcctctatccttcagagactctggaacccctgtggtcttctcttcatctaatgaccctgaggggatggagttttcaagtccttccagagaggtaagagagagagctcccaatcagcattgtcacagtgcttctggaatcctggcactggaatttaatgaatgacagactctctttgaatccagggccatcatggctctttgagcaaggcacagatggagggaggggtcgaagttgaaatgggtgggaagagtggtggggagcatcctgatttggggtgggcagagagttgtcatcagaagggttgcagggagagctgcacccaggtttctgtgggccttgtcctaatgaatgtgggagaccgggccatgggcacccaaaggcagctaagccctgcccaggagagtagttgaggggtggagaggggcttgcttttcagtcattcctcattctgtcctcaggaatgtcccaagcctttgagtagggtaagcatcatggctggcagcctcacaggattgcttctacttcaggcagtgtcgtgggcatcaggtgagtgagtcaaggcagtggggaggtagcacagagcctcccttctgcctcatagtcctttggtagccttccagtaagctggtggtagacttttagtaggtgctcaataaatccttttgagtgactgagaccaactttggggtgaggattttgttttttttcttttgaaacagagtcttactctgttgcctgggctggagtgcagtggtgcaattttggctcattccaacctctgcctcccagattcaagcgattctcttgcttcagcttcccaggtagctgggattacaggcggccaccactacgcccagctaatttttgtatttttagtagagacggggtttcaccatgctggcaaggcaggtctcaaactcctcacctcaggtgatccgcccacctcggcctcctaaagtgctaggattacaggtgtgagcccctgcgcccggccaaggggtgaggaattttgaaaccgtgttcagtctctcctagcagatgtgtccattctccatgtcttcatcagacctcactctgcttgtactccctccctcccaggtgcccgcccctgcatccctaaaagcttcggctacagctcggtggtgtgtgtctgcaatgccacatactgtgactcctttgaccccccgacctttcctgcccttggtaccttcagccgctatgagagtacacgcagtgggcgacggatggagctgagtatggggcccatccaggctaatcacacgggcacaggtaaccattacacccctcaccccctgggccaggctgggtcctcctagaggtaaatggtgtcagtgatcaccatggagtttcccgctgggtactgatacccttattccctgtggatgtcctcaggcctgctactgaccctgcagccagaacagaagttccagaaagtgaagggatttggaggggccatgacagatgctgctgctctcaacatccttgccctgtcaccccctgcccaaaatttgctacttaaatcgtacttctctgaagaaggtgaggaggaaggggacaagatgacatagagccattgaaacttttcgtttttcttttctttttttaaaatttttttgaggcagaatctcactctgcccattctgtcggcgagacaggagtgcagtggtgtgatctcccctcacagcaacctctgcctcccaggctatagtgattctcctgcctcagcctcctgagtagctggaattataggcgtgcgccactaccacctggctaatttttgtatttttagtagagacagggtttcatcatgttgaccaggctagtcttaaactcctgacctcaaatgatatacctgccttggcctcccgaagtgctggaattacaagtgtgagccaccgagcccagcagacacttttcttttttctttttttttttttgagacagagtctcgcactgtcacccaggctggagtgcagtggcacaatctcagctcactgcaacctccacctcccgggttcaggtgattctcctgtctcagcctctcgagtacctgggattacaggtgcctgccaccacgcccggctaattttttgtatttttagtagagacagggtttcactatgttggccaggatgattgcgaactcctgacctcgtgatctgcccacatcggcctcccaaagtgctgggattacatgcgtgagccactgacacttttctttgccctttctttggaccctgacttctgcccatccctgacatttggttcctgttttaatgccctgtgaaataagatttcgccgcctatcatctgctaactgctacggactcaggctcagaaaggcctgcgcttcacccaggtgccagcctccacaggttccaacccaggagcccaagttccctttggccctgactcagacactattaggactggcaagtgataagcagagtcccatactctcctattgactcggactaccatatcttgatcatccttttctgtaggaatcggatataacatcatccgggtacccatggccagctgtgacttctccatccgcacctacacctatgcagacacccctgatgatttccagttgcacaacttcagcctcccagaggaagataccaagctcaaggtaggcattctagctttttcaggccctgagggccctgatgtctgggggttgagaaactgtagggtaggtctgcttgtacagacattttgtcccctgctgttttgtcctgggggtgggagggtggaggctaatggctgaaccggatgcactggttgggctagtatgtgttccaactctgggtgcttctctcttcactacctttgtctctagatacccctgattcaccgagccctgcagttggcccagcgtcccgtttcactccttgccagcccctggacatcacccacttggctcaagaccaatggagcggtgaatgggaaggggtcactcaagggacagcccggagacatctaccaccagacctgggccagatactttgtgaagtaagggatcagcaaggatgtgggatcaggactggcctcccatttagccatgctgatctgtgtcccaaccctcaacctagttccacttccagatctgcctgtcctcagctcacctttctaccttctgggcctttcagccttgggcctgtcaatcttgcccactccatcaggcttcctgttctctcggtctggcccactttctttttatttttcttcttttttttttttttgagaaggagtctctctctctgtcacccaggctggagtgctgtggcgccatcttcactcactgtaacctctgcctcctgagttcaagcaattctcctgcctcagccttccaagtagctgggattataggcgcctgccaccaggcccagctgatttttctatttttagtagagacggggtttcgccaggctgttctcgaactcctgaactcaagtgatccacctgcctcggcttcccaaagtgctgggattacagtgtgagccaccacacccagctggtctggtccactttcttggccggatcattcatgacctttctcttgccaggttcctggatgcctatgctgagcacaagttacagttctgggcagtgacagctgaaaatgagccttctgctgggctgttgagtggataccccttccagtgcctgggcttcacccctgaacatcagcgagacttcattgcccgtgacctaggtcctaccctcgccaacagtactcaccacaatgtccgcctactcatgctggatgaccaacgcttgctgctgccccactgggcaaaggtggtaaggcctggacctccatggtgctccagtgaccttcaaatccagcatccaaatgactggctcccaaacttagagcgatttctctacccaactatggattcctagagcaccattcccctggacctccagggtgccatggatcccacagttgtcgcttgaaacctttctaggggctgggcgaggtggctcactcatgcaaacccagcactttgggaagccgaggcgggtgatcacctgaggtcaggagtttaagaccaccctggccaacgtgttgaaaccctgtgtctactaaaatacaaaaaaaaaaaattatctgggcatgatggtgggtgtctgtaatcccagctactcaggaggctgagaagggagaatcagttgaacccgggagatggtggttgcggtgagccgagatcgcgccactgcactccagcctgggaggctgagcgagactccatctcgaaacaaaacaaaacaaaactatctaggctgggggtggtggttcatgtatgtatgtgtatatacatatatatgtgtttatatgtatatatatatacacacacacacatacatacacacacatacacacacaaattagctgggtgtggcacccgtgtagtcccagctactcaggaggctaatgtgggaggatcagttgaccctaggaagtcaaggctgcagtgagtcgtgattgcgccactgtactccagcccgagtgacagagtgacatcctgtctcaaaaacaaaaaaaaatctccccaaacctctctagttgcattcttcccgtcacccaactccaggattcctacaacaggaactagaagttccagaagcctgtgtgcaaggtccaggatcagttgctcttcctttgcaggtactgacagacccagaagcagctaaatatgttcatggcattgctgtacattggtacctggactttctggctccagccaaagccaccctaggggagacacaccgcctgttccccaacaccatgctctttgcctcagaggcctgtgtgggctccaagttctgggagcagagtgtgcggctaggctcctgggatcgagggatgcagtacagccacagcatcatcacggtaagccaccccagtctcccttcctgcaaagcagacctcagacctcttactagtttcaccaaagactgacagaagcccttcctgtccagctttccccagctagcctgcccttttgagcaactctggggaaccatgattccctatcttccctttccttcacaggtctgcacacctcattgccccttttgcaactactgaggcacttgcagctgcctcagacttctcagctccccttgagatgcctggatcttcacacccccaactccttagctactaaggaatgtgcccctcacagggctgacctacccacagctgcctctcccacatgtgacccttacctacactctctggggacccccagtgttgagcctttgtctctttgcctttgtccttaccctagaacctcctgtaccatgtggtcggctggaccgactggaaccttgccctgaaccccgaaggaggacccaattgggtgcgtaactttgtcgacagtcccatcattgtagacatcaccaaggacacgttttacaaacagcccatgttctaccaccttggccacttcaggtgagtggagggcgggcacccccattccataccaggcctatcatctcctacatcggatggcttacatcactctacaccacgagggagcaggaaggtgttcagggtggaacctcggaagaggcacacccatccccttttgcaccatggaggcaggaagtgactaggtagcaacagaaaaccccaatgcctgaggctggactgcgatgcagaaaagcagggtcagtgcccagcagcatggctccaggcctagagagccagggcagagcctctgcaggagttatggggtgggtccgtgggtgggtgacttcttagatgagggtttcatgggaggtaccccgagggactctgaccatctgttcccacattcagcaagttcattcctgagggctcccagagagtggggctggttgccagtcagaagaacgacctggacgcagtggcactgatgcatcccgatggctctgctgttgtggtcgtgctaaaccggtgagggcaatggtgaggtctgggaagtgggctgaagacagcgttgggggccttggcaggatcacactctcagcttctcctccctgctccctagctcctctaaggatgtgcctcttaccatcaaggatcctgctgtgggcttcctggagacaatctcacctggctactccattcacacctacctgtggcgtcgccagtgatggagcagatactcaaggaggcactgggctcagcctgggcattaaagggacagagtcagctcacacgctgtctgtgactaaagagggcacagcagggccagtgtgagcttacagcgacgtaagcccaggggcaatggtttgggtgactcactttcccctctaggtggtgccaggggctggaggcccctagaaaaagatcagtaagccccagtgtccccccagcccccatgcttatgtgaacatgcgctgtgtgctgcttgctttggaaactgggcctgggtccaggcctagggtgagctcactgtccgtacaaacacaagatcagggctgagggtaaggaaaagaagagactaggaaagctgggcccaaaactggagactgtttgtctttcctggagatgcagaactgggcccgtggagcagcagtgtcagcatcagggcggaagccttaaagcagcagcgggtgtgcccaggcacccagatgattcctatggcaccagccaggaaaaatggcagctcttaaaggagaaaatgtttgagcccagtcagtgtgagtggctttattctgggtggcagcaccccgtgtccggctgtaccaacaacgaggaggcacgggggcctctggaatgcatgagagtagaaaaaccagtcttgggagcgtgaggacaaatcattcctcttcatcctcctcagccatgcccagggtccgggtgcctggggcccgagcaggcgttgcccgctggatggagacaatgccgctgagcaaggcgtagcccaccatggctgccagtcctgccagcacagataggatctggttccggcgccggtatggctcctcctcagtctctgggcctgctggtgtctggcgttgcggtggtacctcagctgagggtcaaggaaggaaggtgtgttaggagaactagttcttggatccctgcccactctccccagggctgcccctcccatctgccccttacctccatcccaggggaagtagagactgagaatgtgggtacaataggcacagaggttgtgcagcccacgcaggtggacctgcagcttcccactgggcagctttgcctgcagcagcagggccaagtagctgaagacgaaggcgtccaaggaggcagggctggagcagagagagaagggtgggatggaggagaaccactggggtagaaggggtaaagatggagctggaggaagagtcagccttgggaggtgggctctgggcagcaggcggccaccagggaaggacaggacacacagttctagacctggtatggggagagatccccaggtggcgccagctggccctgaatagggctctatcccagggctgcataaagggcacactcagtgccccacagctcttcaggcccttcctgtgcctggctgccctcccaccctacccttttgtacctctgagaaggctctggccccacgcacagccccactgtcaccagggccagtatctgtctcagggacctcctatccagagcctgagccagccccagccccagccccagctccagctgctccatctgaacctgtatcttcttccaagccacccattaccctcttggagtcagactcacgcatctccaaagaagaacttttgagagcccaggcgctgagagagcagggtcagacactcccgagcctctcggtacagctgtaggggcgacacaggtaggcttgcagctgcgggaacagtgccacctccgcacctaagcactcccattcctggccagcatccttggggctcatctcatacaatagcccccggtctcagagctacctccttctccagctcttcctcgtcctcaggcctgtgctccccagtcagcagctgtagccgttccatgtactgccgctgcatgcggccaggcaggaagaagttgaggggaaagggcatagcctctgcataccacttccgggtcacttctacgtagttcttggtgtctatccaaaaagtatgtacctggattgggtgggcaggaagaaacaggcaggtctgagccagtgcacctgtctgattcaaggtgggcttctgacctccatgctctcctgagtctctgtgtgggtctgtgtgttcccgtcccctccccggctggccatggatgctgggaggtctgggcacactcaccagcaccgggatcaacttctcctccaggagagacatgaaggccagggtgtctgccccttgctgagctgacagatcataatcagcattgtacttctgtggaggaaatatccatggcgtggacgctggggagctgcaagggcacttcaccagggaggaaggagtcctgtctggtacccccctcactggcctctgagtgcagtggaggtacagcaaggaacttttcctgccaaggcccccttgcctgggcccagccagtagcctgttgctgttggcaaaaagcctgggccttggagcccgctggccgtcaaggtcctgggcccattgagaagaaggaagaaaggttgggccgcaaactaggagcagctcccagaatttccatggaaagctggaacaatgcctgctgacagcaactttctaacagtaactttcccgacccagacaccacaaagctagcacaacggagctcagatgcaggctaggactcggtccatgcctcaggaaccagggaaagccatcctcacactccctggatccagggaacccacgcccagggccccccagcttgttccctcagtgcccagctcttggctatttctttcacttcattccatcgcccagacaccattaccacatacacattccatccatacccccaggtctcagcctgccctaccttcccaggctccagtccctgttcctcagcatcccccaccacatcctgagtaagctttgtccccagataacctcttcagcatgatccttaaatctccctaagcctcagtttctcccctgtggaatgggggtaagaatctctttctctgaatgcccctgtgttaggaaataatttagaatacttcggaaacaaaaagctctgttcacacctaagcaatcagggcagtggcctggccttgccaggaacttaggcttttatctggatcctctttccaggcctctcaattaattccccaggtccttaacctttgggaaattagaaattaggaagagtgtcccacttctgacactgtgttccctcttggaacctgaccgtcaatgctagaagaacccttggaaaacatgctggcccagccctctagttttacaaataagggagtgcacagccctgagaggttacatggcctgcccaagatcacgcagtcaatggcagagtaaagagcatagcctaggcctccccactcctctagtaatgctctttcatcttctccaacctggctctaagccttgtccatcctgagccccatatctagcccaacctagtccctgaaaacaagaagtggcccttagaaatctctctccagtcccactatcagaggccaactgctgtcttccagtctccttcagcctgtgctcctctccctccctgactgacaggcagaaggtaccgtgcctctggatatccccacagtgccctgagctgcatctcttgccgactgctttaatacatcacagtgacattgtgtgtgtctctgccaccagactattgctccttgatgctctgggtcacctgcatctagcatggcatatatctagtgctcaataaatgtgtattgtacggaattgactgaacttctctcactggcagccccctctatccaaatcacccacctctttttgaaggtgggtgatgatcttgtgtggtactgaggtgacctctccatgactggtccaaagggcaggcagggttcctgatactgagagaaaagtataccaaccaggaccttagctgcctatccatacgtagttgcaacacattcctgcctatctcctgcttctcctcttgtacacacccttcctcacccccaagggatactgggtacctgaagggctctgccaggggttgctgatcttgtgctatatggtgcacaagaaacttttaagaaaaaagaaactttcaagacacactttccaaccacgaattctatctctgctccttttcatagcaataggttttctttttcttccctccacacttaaacatccattctcttatcacccacccccatcagactccttcccctgtgtttcttcagccactgctctgaccaaaatttgagtgaccaaaagtggtgtcagacccagtgaccatttctctgcctgcatttcacttgaccttgaagcagcaattaatctccataatcagcatcttcttgaatttttccctttgaggacattgctcttctactttgtgctctggttatcctttacaaacttttacacctctcctgaactggttaacagtagagggccccaagggtctcacgtaagccttctttgtttttgttttttttcttttcttttattttttatatatttttttgagacggagtcttgctctgttgcccgggctggagtgcagttgcacgatctcggctcactgcaagctctgcctcccaggttcatgctattctcctgcctcagcctcccgagtagctgggactacaggtgcctgccaccatgcctggctaattttctgtatttttaacagagacagggatacaccatgttagccaggatggtctcgatctcctgacctcgtgatctgcccacctcagcctcccaaaatgctgggattacaggcgtgagccactgctcccagccgtcatttttattttattttatttatttttttgagatggagtcttgctcttttgccaggctggagtgcatggtgcgatctcggctcattgcaacccccgcctcccaggttcaagcgattctcctgcctcagcctcctgagtggctgggactacaggtgcctgtcaccatgcctggctaattttctgtattttagcttgagacacggttttcaccttgttagccaggatggtctcgatctgtgagcctcgtgatctgcctgcgtcggcctcccaaagtgctgggattagcaggcagtgagccactgcacccggccatcaattttttttttttttaaatggagtcttgctctgtcacccaggttggagtgtaacagtgcaatcttggctcattgcaacctccgcctcttgggttcaagcgattctccagcctcagcctcctgagtagctgggactacaggtgcatgccaccacacccggctagtttttgtatttttagtagagacggggtttcaccatgttgtccaggatggtctcaaactcctgacctcaaatgatgtgcctgccttgaccttccaaagtgctgggattagaggcgtgaaccacattgcccaccgtaagccctcttttctacttccactctttctgtaggtggccctactactaacgtccatggctttaagtaccatctttctatgtgttaatgcataagtccagccttgacctctcttgagcgccatccaactcagcatatctggttggatgtctaatgagtatttcaaattcaacatggccacaactgaactaactgaactcttttttttttttaggcagagttttgctcttgttgcccaggctggagtgcaatggcgagatcttggctcactgcaacctctgcctccagggttcaagcgattctcctgcctcagcctcccgagtagatgggattataggccccgctacccggctaatgtttttgtatttttagtagagacagggtgttgccatattgaccaggctggtctgcaaatcctgacctcaggtgatccccctgcctcggcctcccaaagtgctggaattacaggcgtgagtcactgccccggccacacaactgagctcttcattcccaccccagcaccggttatttttccactgttcccatctcaatggcacctccattacccatttgcacattccaaaagcccaggaaccatggtgacttcttttcccatatccaacacaaccaatcctatcttgaattcatccacgtcccaccacctccccagctacctagttccagccaccctctctccacaacctctgaatcaatctttcacttttcccagcaatccattctccactcagcaaaatgatgataaagcacgtcacatcaaggctctgcctcaatttaatggcttcccattgtatttagaatcatctccaagctctcagagactatggtcagctacaatctggcccaccttctgttccagccaaatttcctcacagcacaaggacgtttgcacctgctattttccaagcacgaaaccctcgggcagatatatctggtgctgtcacctaatttcaggttttaactccactctcaccatttcagtgaggacctaatccccatcgcagtcattctatcacatagctttattttattttattttatttttttttgagatacagtctggctctctcacccaggctggagtgcagtggtgtgatctgggctcactgcaaacttccatctcctgcgttcaagcgattctcctgcctcagcttcccgagtagctgggattacaggtgtctgccatcacgcctgactaagttttgtattttcagtagagacggggttttgccatgttagccaggctggtctcgaactccttgacctcaagtgatccacctgcctcagcctcccacaatgttggatttacaggcgtgagccactgctcccggccacatagccatgttttaagcatgtatcactatctaaaattattttttgtttatacgtttgtgtcgtcctgtagaatgtaaggtcacaagatcagggacttgctcattgcactgggtctaacacacagtgcttcaacaaacactcgttaagatactaacgtggcagagtggggccttgtaaacagtttcaggaccctgtgcttgtaagagcaacgtggtgccctcccaaggaagacagggaggatgcaggagcactgcccagagatggcgtcaggctgcaagacatcttgaataattcaccatcgtaacaacccagcctcaggaagagatggggcaaggccagaacgaaacattaggtaagaggcggtggacaatgggattcccacagggcagcttttgggcactggacgttccctaacctgaggctctctgaagaggaaggttaggaatcctctcagcttcggtgggctggactcactgtgggaattcaatcgcccccccccacccactaagggtgtgctggcgggaaagcgctgagacgcatgcgtagttctcgcgtctggcacccgctccctttccaatacgcttgcgccccgtctgtgctacggatggtcagggagagttgtccgtcttcaaatggaccaatgagacttgtggaggggctctgagtcccgcctctggatgagtgaccgtctcttttccaagtgaggcccgcccgcctccccagggctgcttttctcgcggcacgggtggtggggctgcttcttgacttccgcgcctagtgcgcagggccccattctccagtcccgcccacgcgcctttggaggctgcggtgggatttccttttgccttcggttggggctgctgtttctcttcgccgacggtaggcattataaatatttcgccctttgaattttagctctcccctcccggcgttcgcacttagcctttttcatcattatcattatttttaatggtaaggatggtcaaattttactaatgaagcgattataaaatcttcaagtctttgtatccacttgctttttgagggctggagtgggaagaaaggtatataattcattcattcttcggacatgtgacaaacgttcacggagcgcggcaacgagcgccggtgtcgcgatgcgcactggggctgcacatgggagccaggatggactggactggtccctgccctgcccgctgacgattggcaggccactgcctttgatgagctgggcgctataactgccattaagccatttgtacaattaatcacaacagtgataagagcgacaaaggagctattcgggtggctgaggcggaggatcttttgagcctaggagttcgagaccagcctggggaatagagcgagatcctgtctcaaaaaaagggggagaaaaagtgacaaagaagttgtgagggctatgagtttgcgttagaggaggtgtgtgaggtggggaggcggcagggggcgcggttgttcttagagaaagtgacatccgggctaattttgaaagaataagtgttaactaggctaagcggtgggaaagagtagtgtgtgctgaaggaagggaagaggaacctggcaagttcatggcaggcctgtaattggatgctggtctccctccacacttgactcctacagtctgatttctacacagcacccaaagtgatctcttaaaaatacacatgtgatcttgtcacttcccagcaccaaactctacagtgaatttccatcttagaacaaaattcagactccttaccatggccaccaagaccctacacaatctggcctcccaatttccttttccaaggtcaccttttaccactatccatctcactcacactgctccagcactctctatgcttttatttttctttcttcctctttctttctttctttctttttctttttctttctttctttccttccttctctctctctctctttcttttcttttctctttcttttttttttttttgagatgcagtcttgctctgtcacccaggtgtgtgatcttggctcactgtcaacccagagcagtgggggtgatcttggctcactgcagcctccgccttccaggttcaagcaattctgcctcagcctcctgagtagcagggattagcgccatcagtcccagctaatttttgtatttttagtagagatttcatcatgttgtccaggctggtctcgaactcctgacttcaagtgatctgcccatctcagcctcctaaagtgctgagattacaggcaggagccaccacacctggctcagtatttgttttatttttgttgtgtttatttatttagagacaaggtcttgctctgttgctcaggctggagtgctgtggcaggaacacagctcactgcagcctccactacctcaattcaggcgatcctcccacctcagctgagactacaggtgtgcatcaccatgcctggttaattttttcgttttaccatgttggccaggtttgtctcgaactcttgggctctgctgtcctcctaccttagcctcccaaagtgctaggattgtaggcgtgagccactgtgcccagctggtgttcagtatttgaatccatatttcctgtagccgcaaccaaagttccactgttaggtctcactttgactttaataattgtgttcaggctgggcacactggctcaagcctgtaatctcagcagtttgggaggccgaggtgggtggatcacatgaggtcaggtgtttgagaccagcctgtccaacatggcgaaaccctgtctctactaaaaatacaaaacattctccgatcgtagtggcgggcgcctgtaatcccagctacttgggaggctgaaggaggagaattgcttgaacctgggaggcagaggttgcagtgagcggagatcacgtcattgcactccagcctgggctacagagcgagactctgtctcaataagtaaataaataaataaataaataaataaataaataaataattgtgttcggagtcagcatcattcttcctgaagttcaccactcctttgccaagaacacttcctgaaacactgacaagcaggaccttgaataatggggtatggttggtaacaactcactcattcaacaaacattgagcacctattttgtgcttgcctctaaatgaagagctggttgtattatttatttttttaggtgacagggctttccctatgttgcccaggttcgtctcaaactcctgggctcaaaagatcctcatcttctcaagtggttgaatatacacgctccagcgaccatgcctggctgaatgaagagctttgagattttgaagaaacaggaaccatgaaatttgctttgcaactgtttgcaacctttaaggaagactgaaaaggcattcctgaagcatgtgagaagcagtctgtgtgacctgatgactcagaactgcttggaatttagattaggacagatatgagcttaggcttcactctgccacatatttaacttctctaagtcttagttttcttttctttttttttttttttgagatggagtctcgctctgtcacccaggctggagtgcagtggcacgatcttggctcactgcaagctccgcctcccgggttcacgccatcctcctgcctcagccacccgagtagcggggactacagtcgcacaccgccacgcctggctaaatttttgtatttttagtagagacgggtttcaccgtgttagccaggatggtctcgatctcctaaccttgtgatccgcccgcttcggcctcccaaagtgttgggattacaggtgtgagccatcgcgtctggcctctaagtcttaattttcttatctgtaatgtagagttgtcaggctagtgcatgtaataagcactcatgaaagactgactattatcttgcgaaaaattggaagagatcatatgaggtacaaggaccttccatctgcactgggctgtacattgaatgttgtggttactgttgaagcattggtaaatcacatgaatccaatggtaaaaccacaccctaaggtcagactcagtggctcacgcctgtaattccagcactttgggaaaccaaggcaagaggattgcttgagctcaggagttcgataccagtctaggcaacctgtttctataaaaagttaaaaaattagcttggtgtggtggtgtgcacttctggtcccagctactcaggaggctaaggtgggaggatcccttgagcccaggtggtcgaggctgcagtgagccaggatcacaccattgcattccagcctggatgacagtgtgaggccctgtcttaaaaaagacaaaaacaaaccaaaaaaacccacaccctagtgggtaaggggcagcagaggtcccacccaagagtgaaatcatttttggtgtcagtaatcagggagagtaatataccctcaggccagaaactagaggtgagtgatggctcacgcctataatcccagcaccttgggaggctgaggcaggtggattgcttgacctcaggaattcgagaccagcctgggcaacataggaagaccccatctctaaaaataaatttcaaaaattagttgggcatggtggcatgtacctgtagtcccagctactatggaggctgaggtgggaggatccaattgagcctgagaggtcaaagctgcagtgaattgtgattgtgccaagaccctgtctctaaaataaaataaaattacaattaaaaactagagctgaaaggacaggttctaggttaactggtagtagttgttcattcatctgtataaaaagtacttttttgagcacctactctgtgctgtgcatggaatgaacaaatgtctttatttgacttgaacacagaccatagaagtaactaacagtggaactgggagtggcactctccatgggacctaaagacctaggagcctgtgatatgatacctgtcagtgtgaaagggctggagtttgctatctgagccagacctacactccaagacaggtcttgctgggatgggatcaaaattgctgctgggtcagccgaactatttttgtacttctgcttttcacttatatttatgtcttccctaggtatatagctgtctttttttgtttgcttgtttttctgagtcagagtcttgctctgtcactcaggctggagtgcagtggcgcgtctcggctcactgcaacatccacctcgggttcaaacgattctcctgcctcagattcccgagtagctaggattacaggtgcccaccaccatgcccggctaattttttgtatttttaatagagatggggtttagtagagacagggttcactgtgttatccaggatggtctccatctcctgacctcgtgatctgcccgcctcagcttcccaaagtgctgggattacaggcatgagccactgcgcccggccactggagaccccttttctaccaaaaaaaataaaaataaataaataaatatatatatatatttgtaaagacggagttctctatgttgcccaggctggtcttgaactcctggcctcaagggatcctcttgtctcagcttcttaaaatgatggggttacaggcatgagccaccgtaccaggccttagcaaactctttttcaagtgctatacaaaggggacagaggaacgtgattgtggccacctagtatgcccctattggccactgcagtgaggcctaggtgtttgaagagaggcacctagggtagtggctctcaggcacaccctaggggcattttggaaatttgtggggcatctttaatagagacaatgattaggaggcactttgagaatttagtggatggagcccaggaaaggtagacattctgcaacatgtagtacattcatacacaaggaagaattcactcatttcacctgacttacaaatataaaatcaaatataaatcagtaggactttattataaaatattgcagaaaagtttcacaagaattttttgtagaaaaagcccaatcagggccgggcatggtggctcatgcctgtaatctcaggactttgggaggccgaggcgggtgaatcacctgaggtcaggagtttgggacaagcctggccaacatggtaaaaccccgtcttgactaaaaatacaaaaatcagccaggcatggtggtgtgcgtctgtaatcccaggtactcgggaggctgaggcaggagaatcgcttgaacccaggaggcggggtttgcagtgagccaagatcaagccactgtgctccagcctgggtgaaagagcaagactccgtcgaaagaaagaaaggaagggaggaagggaggaagggagggagggagggagggagggaaagaaagaaaaaagagaagagaggggaggggagggaagaggagaaaagaaggaaggaaggcaggaaggaaggaatccagtcgagatcgttaaatttgttgtaattttgtctttggcacaataaacattagtccttattaaaactaactttacttagaaaataaaatagaaaatcctcaaggacaaatcacattgtacaggaaatatgaaatgtgaaataatatccaccttggaaattttttttttttgaaacagagtgttactctgtctcccaggctggagtgcagtggcacaatcttgggtctctgcaacctctgactcctgggttcaagtgattctcgtacctcagcttcccaagtagctgggattacaggcgtgcaccaccacacccagctaatttttgtattttcatttcagatgggattttgccatgttggccatgaacacctgtcctcaagctatccactgcctcagcctcccaaagtgctgggattataggcatgagctaccgtgcccagccaccctggaaaaattttacaaaatgaagtataaaaagaagaaaagaggggcgggcatggtgccttgtgcgtgtaatcctagaactctgcaaagccgaggcaggagatcctttgggtttaggagtttgagaccaacctgcacaacatagcaagaccctatttctacaaaaaatacagacactaggctgggcgtggtggctcacgtgtaatcccagcactttgggaagctgaggccagcagatcacgaggtcaggagatggagaccatcctggctaacatagtgaaaccctgtctctactaaaaatacaaaaaattagccgggtgtggtggcaggcgcctgtagtcccagctactcaggaggctgaggcaggagaatggcgtgaatccgggaggcggagcttgcagtgagccgagatcgtgccactgcactccagcctgggagacagagcaagactccgtctcaaaaaaaaaaaaattttgctcagtacctggccaaaaaagaagcagctcactccctgtacacagaggggtaagagaaaggagatggttgaacttctaaactcgctaaagcaggagaggcaaatgtggaatgtgctcaggaaatatctgtgagatgaatgaatttgagggaagtaaggtactagataattacctgccctacccagaacaaatcctgtgcaacgtttccttgaagagcaggaagtcaggccgggtgctgtgctcacgcctgtaatcccagccctttgggaggccaaagtgtgcgaatcacctgaggtcaggagattgagaccagtctggctaacatggtgaaaccccatctctactaaaatacaaaaattagccgggcgtggtggtgcgtgcctgtagtcccaactacttgggaggctgaggcaggagaattgcttgaacctgggaggcagaggttgcggtgagctgagatcggccactgcactccagactgggtgacagagtgagacaacatctcaaaaaaacaaaaaaaaaagagaaaagcaggaagtctggaaggggtggctactgacatagtgaagcaactagttcaattctacaacttgacaactacccctgtgccaggctgtctacaaggatatttagaatgtgtaagacattccttcaaggaactccaggaacagaggcctgacatgttgcaatgtttagtgtcaagcagtgtactagagacacattatcacactcaaacctcacaacagttctatgaggtaggagttatcactccccttttatagatgaaatagaggcttagagtgattgatttactgaaggtcaaacagccagtaaatggtgtagcaaggattccaaccttgccgtctcactaaaactgtacaaaaaaagatacaaacaacagacaaatagttcccaggcgcctcccaagttgccaggcactgcatttacctcactgacccctttgaggttgtggcattgcctccattttctaggtgaggaaataggctgagagctggggttagtctggtcatgactgtgtgtgccactcccaccaaatctcatttgatgtggttcatgaggcaaatggcatggacaacttccttcacatgtccactaagcatatggccttttacaacactttctggtttctgaactactttaaaacctcactgtcctgtgaggaaggaagaacagttattacaatctgcatctggaagccaattgccctttagagatatggctgcaattgcctcactgcctgtgtcatgtgactctccgaggcccttaatgagtaaatgaggggtgctgcaggggagccaagctgaccactcccctccctccagtcctgccaccccactgccagtgtcccaccctccttgcgccctacacttcactggctaataacccccctcactttttcctgtgttgaaggcatcctggataattccccacccacgaatggtccctcctcatctcagagagctctccatgcacacctgttactgtttctgtttttacctgtaaatatctgtgtctgacttccatgcttcatgcacctctatagggcaaagactgtgtcttaaacatcacggtagcctcagcatgttgtgcaatgaaggtttttttgtttttgttctttgttttttttttggtattagctttatttgtatcattttgaaatttttatcaaaaaagcagcgtgcctgctgtggttcccatcctctgggatttaggaatctttacccgattctccatccaagtctgtctttcgtattctaggctcttcctaaagttgtcattcacatataccctccagaattttatagggtgtataatctgtaacaactcggaggaagccaattgccctttagaaatatggctgcaattgcctcacttcctgtgtcatgtgactctcctagtcatcacatgacccatccacattgggaagccagaattacttgcaggagtaacctagtgcctatagctatggcaggtatcctgcatccttgttttttgtttagtggatcctctatccttcagagactctggaacccctgtgctcttctcctcatctagtgaccctgaggtgatggagttttcaagtccttccagagaggtaagagagagagctcccaatcagcattgtcacagtgcttctggaatcctggcactggaatttaatgaatgacagactctctttgaatccagggccatcatggctctttgagcaaggcacagatggagggaggggtcgaagttgaaatgggtgggaagagtggtggggagcatcctgatttggggtgggcagagagttgtcatcagaagggttgcagggagagctgcacccaggtgtctgtgggccttgtcctaatgaatgtgggagaccaggccatgggcacccaaaggcagctaagccctgcccgggagagtagttgaggggtggagagggacttgcttttcagtcattcctcattctgtcctcaggaatgtcccaagccttcgggtagggtaagcatcatggctggcagcctcacaggattgcttctacttcaggcatgtcgtgggcagtcagatgagtgagtcaaggcagtggggaggtagcacagagcctcccttctgcctcatagtcctttggtagccttccagtaagctggtggtagacttttagtaggtgctcaataaatccttttgagtgactgagaccaactttggggtgaggatttttgaaaccgtcttcagtctctccaaacagctgtgtccgttctccacatccttgtcagacctcacctctgcttgtgctccctccctcccaggtggtgcccctgcatccctaaaagcttcagtacagctcggtggtctgtgtctgcaatgccacatactgtgactcttgaccccccgacctttcctgccctaggtgccttcagccgctacaagagcagaagcagtgggcattggatggagctgagtacaggaccatacaggctaattgcaccggcacaggtaaccattacacccttcaccccccgggccaggctgggtcctcctagaggtaaacggtgtcagtgatcaccatggagtttctccctgggcactgataaccctgtggatgtcctcaggcctgctactgatcctgcagccagaagttccagaaagtgaagggatttggaggggccgtgacagatgcaggtgccctcaacatccttgccctgtcaccccctgcccagaatttgctacttaaatggtacttctctgaagaagatgaggaggaaggggacaggatgacatagagccactgacacttttctttgccaattcttgtggaccctgacttctgcccatccctgacatttggttcctgtcttaatgccagtgaaataagatttcgccgcctatcatctgctaactgctacggactcaggctcagaaaggcctgcgcttcacccaggtgccagcctccacaggttccaacccaggagcccaagttccttttggccctgactcagacactattaggactggcaagtgataagcagagtcccatactctcctattgactcggactaccatatcttgatcatccttttctgtaggaatcggatataacatcatctgggtacccatggccagctgtgacttctccatccgcacctacacctatgcagacacccctgatgatttccagttgcacaacttcagcctcccagaggaagataccaagctcaaggtaggcattctagctttttcaggccctgagggccctgatgtctgggggttgagaaactgtagggtaggtctgcttgtacagacattttgtcccctgctgttttgtcctgggggtgggagggtgggggctaatggctgaaccggatgcactggttgggctagtatgtgttccaactctgggtgcttctctcttcactacctttgtctctagatacccctgattcaccgagccctgcagttggcccagcgtcccgtttcactccttgccagcccctggacatcacccacttggctcaagaccaagggagcggggaatgggaaggggccactcaagggacagcccagagacatctaccaccagacctgggccagatacattgtgaagtaagggatcagcaaggatgtgggatcaggactggcctcccctttggccatgctgatctgtgtcccaaccctcaacctggttccacttccagatctgcctgtcctcagctcacctttctaccttctgggcctttcaaacttggatctgtcagtcttgcccactccatcaggcttcctgttctctcggtctggcccactttcttggctggatcactcatgacctttctcttgccaggttcctggatgcctatgctgagcacaagttacagttctgggcagtgacagctgaaaatgagccttctgctgggctgttgagtggataccccttccagtgcctgggcttcacccctgaacatcagcgagacttcattgcccgtgacctaggtcctacccttgccaacggtactcaccacaatgtccgcctactcatgctggatgaccaacgcttgctgctgccccactgggcaaaggtggtaaggcctggacctccatggtgctccagtgaccttcaaatccagcatccaaatgattggctcccaaacttagagggatttttctacccaactatggatcctagagcaccattccccgggacctccagggtgccatggatcccacagttgggacttgaaacctctctaggctgggggtggtagctcatggctataattccagcactttgggaacccaaggtgggtggatcacttgaacctaaggagttcaagatgagcctgggaaacatggtgaaaccctaactctacaaaaaaaaaaatagaaaagttagccgggtgtggtggtggcacgcctatagtcccaagtattctggaggctaaggcgggaggtttagttgagcctagaatttcaggctgcagtgagctatgattgtgccactgtactccagcctgtgtgacagagggagaccctgtctcaaaaacaaaaacaaaaaatccctcccaaaacctctgtagttgcattcttcccaccacctaattcaggattcctacaagaggaactagaagttccagaagcctgtgggcagggtccagggtgacttgttcttcctttgcaggtactgacagacccagaagcagctaagtatgttcatggtattgctgtacattggtacctggactttctggctccagccaaagccaccctaagggagacacaccacctgttccccaacaccatgctctttgcctcagaggcctgtgtgggttccaagttctgggagcagagtgtgcggctaggctcctgggatcgagggatgcagtacagccacagcatcatcacagtaagccaccccagtctcccttcctgcaaaggaggacctcagacccattagtagtctcaccaaagactgatagaagcccttcctgtccagctttccccaggtagcctgcccttttgggcaactctggggaaccatgattccctgtcttgcctttccttcacaggtctgcacacctcattgccccttttgcaactactgaggcacttgcagctgcctcagacttctcagctccccttgagatgcctggatcttcacacccccaactccttagctactaaggaatgtgccctcacagggctgacctacccacagctgcctctcccacacgtgacccttacctacactctctggggacccccagtgttgcgcctttgtctctttgcctttgtccttaccctagaacctcctgtaccatgtggtcggctggaccgactggaacccatcattgtagacatcaccaagcacacgttttacaaacagcccatgttctaccaccttggccacttcaggtgagtggagggcggggcacccccattccataccaggcctatcatctcctacatcggatggcttacatcactctacaccacgagggagcaggaaggtgttcagggtggaacctcggaagaggcacacccatccccttttgcaccatggaggcaggaagtgactaggtagcaacagaaaaccccaatgcctgaggctggactgcgatgcagaaaagcagggtcagtgcccagcagcatggctccaggcctagagagccagggcagagcctttgcaggagttatggggtgggtccgtgggtgggcgacttcttagatgagggtttcatgggaggtaccccgagggactctgaccatctgttcccacattcagcaagttcattcctgagggctcccagagagtggggctggttgccagtcagaagaacgacccggacgcagtggcactgatgcatcccgatggctctcctgttgtggtcgtcctaaaccggtgagggcaatggtgaggtctgggaagtgggctgaagacagcgttgggggccttggcaggatcacactctcagcttctcctccctgctccctagctcctctaaggatgtgcctcttaccatcaaggatcctgctgtgggcttcctggagacaatctcacctggctactccattcacacctacctgtggcgtcgccagtgatggagcagatactcaaggaggcactgggctcagcctgggcattaaagggacagagtcagctcacacgctgtctgtgactaaagagggcacaacagggccagcgtgagcttacagcgacgtaagcccaggggcaatggtttgggtgactcactttcccctctaggtggtgccaggggctggaggcccctagaaaaagatcagtaagccccagtgtccccccagcccccatgcttatgtgaacatgcgctgtgtgctgcttgctttggaaactgggcctgggtccaggcctagggtgagctcactgtccgtacaaacacaagatcagggctgagggtaaggaaaagaagagactaggaaagctgggcccaaaactggagactgtttgtctttcctggagatgcagaactgggcccgtggagcagcagtgtcagcatcagggcggaagccttaaagcagcagcgggtgtgcccaggcacccagatgattcctatggcaccagccaggaaaaatggcagctcttaaaggagaaaatgtttgagcccagtcagtgtgagtggctttattctgggtggcagcaccccgtgtccggctgtaccaacaacgaggaggcacgggggcctctggaatgcatgagagtagaaaaaccagtcttgggagcgtgaggacaaatcattcctcttcatcctcctcagccatgcccagggtccgggtgcctggggcccgagcaggcgttgcccgctggatggagacaatgccgctgagcaaggcgtagcccaccatggctgccagtcctgccagcacagataggatctggttccggcgccggtatggctcctcctcagtctctgggcctgctggtgtctggcgttgcggtggtacctcagctgagggtcaaggaaggaaggtgtgttaggagaactagttcttggatccctgcccactctccccagggctgcccctcccatctgccccttacctccatcccaggggaagtagagactgagaatgtgggtacaataggcacagaggttgtgcagcccacgcaggtggacctgcagcttcccactgggcagctttgcctgcagcagcagggccaagtagctgaagacgaaggcgtccaaggaggcagggctggagcagagagagaagggtgggatggaggagaaccactggggtagaaggggtaaagatggagctggaggaagagtcagccttgggaggtgggctctgggcagcaggcggccaccagggaaggacaggacacacagttctagacctggtatggggagagatccccaggtggcgccagctggccctgaatagggctctatcccagggctgcataaagggcacattcagtgccccacagctcttcaggcccctcctgtgcctggctgccctcccaccctacccttttgtacctctgagaaggctctggcccccacacagtcacactgtcactagggccagtttctatcccagggacctcctatccagagcctgagccagccccagccccagccccagctccagctgctccatctgaacctgtatcttcttccaagccacccattaccctcttggagtcagactcacgcatctccaaagaagaacttttgagagcccaggcgctgagagagcagggtcagacactcccgagcctctcggtacagctgtaggggcgacacaggtaggcttgcagctgtgggaacagtgccacctccccacctaagcactcccattcctggccagcatccttggggctcatctcatacaatagcccccggtctcagagctacctccttctccagctcttcctcgtcctcaggcctgtgctccccagtcagcagctgtagccgttccatgtactgccgctgcatgcggccaggcaggaagaagttgaggggaaagggcatagcctctgcataccacttccgggtcacttccacgtagttcttggtgtctatccaaaaagtatgtacctggattgggtgggcaggaagaaacaggtaggtctgagccagtgcacctgtctgattcaaggtgggcttctgacccccatgctttcctgagcctgtgtgtgggtctgtgtgttcccgaaccctccccggctggccatggatgctgggaggtctgggcacactcaccagcaccgggagcaacttctcctccaggagagacatgaaggccagggtgtctgccccttgccgagctgacagatcataatcagcattgtacttctgtggaggaaatatccatggcgtggacactagggagctgcaagggcacttcaccagggaggaaggagtcctgtctggtacccccctcactggcctctgagtgcagtggaggtacagcaaggaacttttcctgccaaggcccccttgcctgggcccagccagtagcctgttgctgttggcgaaaagcctgggccttggagcctcctggccgtgaaggtccagcgcccaatgcagggaaggaaggaaggctccgccgcaaactaggagcagctcccagaatttccatggaaagctggaacaacgcccgctgacggcaactttctaacagtaacttccccgacccagacaccacaaagctagcacaacggagctcagatgcaggctaggactcggtccatgcctcaggaaccagagaaagccatcctcacactccctggatccagggaacccacgcccagggccccccagcttgttccctcagtgcccagctcttggctatttctttcacttcattccatcgctcagacaccattaccacatacacattccacccatacccccaggtctcagcctgccctaccttcccaggctccagtccctgttcctcagcatccccctccacatcctgagtaagctttgtccccagataacctcttcagcatgatccttaaatctccctaagcctcagtttctcccctgtggaatgggggtaagaatctctttctctgaatgcccctgtgttaggaaataatttagaatactttggaaactggaaaagctctgttcacacctaagcaatcagggcagtggcctcggctctgccaggaactttggcttttatctggatcctctctttccaggcctctcaattaattccccaggtcctcaacctttgggaagttagaaatgaggaagagtgtcctacttctgacactgttccctcttggaacctgaccgtcaatgctagaagaacccttggaaaacatgctggcccagccctctagttttacaaataagggagtgcacagccctgagaggttacatggcctgcccgagatcacatagtcaatggcagagtaaagagcatagcctaggcctccccactcctctagtaatgctctttcatcttctccaacctggctctaagccttgtccatcctgagccccatatctagcccaacctagtccctgaaaacaggaagtggcccttagaaatctctctccagtcccaccatcagaggccaactgctgtcttccactctccttcagcctgtgctcctctccctccctgcctcacagtgccctaagtttcatctcttgccgactgctttaatacatcacagtgacattgtgtgtgtctctgccacaagactgttgctccttgatgctctgggtcacctgcatctagcatggcatatatctggtgctcaataaatgtgtattgtatagaattgactgaacttctctcactggcagccccctctatccaagtcacctacctcttttcgaaggtgggtgatgatcttgtgtggaactgagatgacctctccatgactggtccgaagggcaggcagagttcctgatattgagagggaagtataccaaccagacccttagctgcctagtcatacatagttgcaacacattcctgcctatttcttgcttctccccttgtacacacccttccttacccccaagggatactgggtacctgaagggctctgccaggggttgctgatcttgtgtaccttcagtggagcaccagtaaatctggcataggtctgcagggaaggaagcagaagtcagagaggcagagccatgtcccccacagtggtatcaagaagagaaataacatttattgaataccttatgtgccattccctatacttagtatcttagtctcgaaaaaaaagggggagtcactaccatttctattttacaaatggacaacacagggctcagagagattccggacatgtctgtgattacaggacagccaggaaaatcctttcctctatctcctctcttgccatctacctggtgaacatctatcctcagaagcttttcctaaccagtatccctcttcttggaagcactgataatgcccttctctttggcagtatctgtggtctgttcctactttaacttatatgtgaatattttattatatttatttgcttacctatctgcctttctgtaaactcgaagggaggaaccaaattttattcatctttgcctggcaatgtttaatatttggaagaaatctaatagatcctctttaaagcaaggagtcaatgaataaatgaagcaaaggaagtctgattgctaagctctttatacaaagcctggctgtgagtcgtttggtctaacaaacaatagcctcagtaaatgctgttaagtgaggaggaagaggagaagggggctgaggagaaggcaggaattccaagctagagtaggtccctgagacagtccagcctagtaaacctccgaatggagaaaaaaaatgcccaaagagaaaggatctccgcaaggtcacacagccagtgaatggatgagcaaggactagaacccatcacctgaactcccaaccaggcgtcttttcattgctgcattaagcctagaaaactacagcatagggcactgaggccatatcggccacgtacgctctttgactgcctcagtttcccccactgcgcccgtgctgagtagccctggcaaggtttggatgcttggctagttcggccccctccccagtcatcagggcacagcagagggcgccggcgccacccctcaccagcacggccaggctgtccaggtccactgacggcagcccccagccccctgaccagcagaacagctccatgggcgccgccatcttgcccaccctctgtcccggaaacacttccttgtgtgcttctgccctcccctgcctgggcccgccccccgccaccgcccctccgatcgttgcggtcagggggcctggggagatccccggggaggcgaggcttcttctggcccgactggcagctgaactgcgggggactgggccgcgggcctcgggggagggcggccgccggcccatccagaggtggcccacgtagcgggacagcgctgtcggcccggcgcgcctcggagtgtcacggcgcctcgtccaagtggagccccgaacccctgaaggcgcggcaggctctggagagcggggtcttgtgcgcctgggccaggtctgggggctcttgccaaactgcacgtggcctgtactgctccagggccccttggggctcgtccccgagcggggactgcgggggggtcccccgagcagcatgttttccacagcgcgttatgtttggagcgggccctgcgccgcctgtcgccatggaaacaaaacaggggcggtggcggcggccggagcggaggccgggctggggcttgggtgggggaggggaagagaggctcgcaggctgtcgcttaggtgacgggaactcaggcgcccctctgcttcatccgggtcacggcccgtccgctagtacccacagtgttccacagtctggtccttggctcctcgcctgtacccctggtcttctgcgcctgtccctggtgtccctttcctcttttttggtttcttcactctgacctcactgaccactgctttagattctcccttcagttcccgtcagacgcttccagactcccaagctttcctacgaatgagggaaaatggagaaacaggcacttgtcaggggacccccaccctaataaagagcacttgctccgccagaacagcaaaattcatgccatgtgggcatccctgggcactatagcaagctagttgcggccactcccttggcatcctttcctgccagctgtggaataatgcccactgtctagcactgcccctgccaggggttcttgccttccacaatcgtggcttccagaaaacagtggcattcggtagcgctgtgtgccgagacccccaacaatgatgactgcggagagggaggcacctggggggaggatcattagggagaggtagaaagcagggaggcctccaggattctttcccagtgcccctggttcccagagctgatgatgcctccagggtgattggcagctctttgtttcagccccccctcacccgcctgctggccccccctccaattctgtccctccgccccccggctcctgctctctccgcctagccttttcccctcccagctgcctgcctgccaggggtagtgagccggctgagaggcatggagacgcaggaacttcggggggccctggctcttctcctcctttgctttttcacatctgccagtcaggatctgcagggtaagcctgtctccatcctcttagaccgctctctgcttcttccccatttgccctcagcccaagtagcagagaacatgtgggcaaggggagaggggaagagtccagaaattgagccagaggaaaacttaagactgcctagagttggtgaaattatggcctggtggagaggagtgggcaccggagagtagtgggggagctggaacaggacagggtcaggcatgaggccagggcagaggactcaggaactggatgctcaggctgcctggctggggtggttcctgagcatctgtaggcaccctagggtctgggagagcagcctgaaggtgggcgtactgtaggtccctgggcttcgtccccctgggctcctggctgcccaaggacagggcgggggtggggaccaagaagcctgggctctcccggaggtctggtggtgggatgggccgatggatgtgggagaggtagctggagcagatgacacaggcatagattctttactggctggagggaaaaccacagattggccaggacacaggaggcagaggagctgggtcctacattcccgtgggagatagcccagatggtgggagggttagagtcctcagtgggcagctgttcttatccagagcgagtgtgctgcgcccctaggatgggaggaggggaactagggtgtggaacgagccaaacccaggagtggaaagagaagctgccttccatttctacgttgtggacaccaggtgccactcctgtgggggatcagcacagcatctcctttgcgccacctggtgggggcatctcaaatttgtggggtgctgtttctgtgtttccaagtgagtctcaaacctgcaggttcctggaaggtagtaataggcaataatggggaaaggaaggcacagtgcctctgtcctctgagagcaacaagggttgaggtttttttttgttttcgttttgtctttttgagatggagtttcactcttgttgcccaggctggagtgcaatggcgcgatctcggctcactgcaacctccacctctcaggttcaagcgagtctcctgcctcagcctcctgagtagctgggattacaggtgcccgccaccacgcccggctaggtggtttttttttcttttttgttgttgtttttgtatttttagtagacacggggtttcaccgtgttggccaggctggtctcgaactcctgaccttaggcgatccacctgcctcaacctcccaaggtgttgggattacaggtgcgagccaccatgcccagccaagggttgaattttgaggtgactaacgctgcctggtggtgggggtagggggtgatgtgggctcggggagggcataccttagcatttgatcccattctctaaccttgataacccctgcctgaccagtaattgacctgctgactgtgggcgagtctcggcagatggtagctgtggcagagaagatccggacagccttgctcactgctggggacatctacctcttatccaccttccgcctgccccccaagcagggtggtgtcctctttggcctctattctcgccaagacaacactcgatggctggaggcctctgttgtaggcaagatcaacaaaggtgactggtgggcatctcctttcttgcaatggtgacctccttaagcactctccctcatccctacttcccaagtgcttcctcattctccttggcctccattagggaccaaggtcccatcaggctgtgcccagacatcaggggcacctggtatggggtgcttataaggtgctttaggagcccatgtaccaaacaatagggtgaggcttgagtcctgatatttatagggatgggaggttgtacttggggatgcctggaaggagggtgaggcatgtctctgtgcctcagcggtgatacagaaaggtctttcagatccctggaacagtcagtggccacaaaaccagctgtcaccctaggagaggatacagtcatctgataccaatgaagactaagaaagtatttgtctctaaaccaattatttttttaaatggagtcttgctttgtcacctaggctggagtgcagtggtacaatctcagctcactgcaacctctgcctcctgggttcaagcaattctcctatctcagcctcctgagtagctgggactacaggtgcccaccaccatgcctggctaacttttgtatttttagtagaaacagggttttgccatgttgaccaggctgttctcgaacttctgacctcaagtgatctgcccaccttggccttctaaagtgctgggattacaggtgtgagccaccgtgcctggcctctaaagcaatttcaaaaacatttattgtgtacctattaaatacaaggtgttgagagccacatagtagaattagggataggggccctagagatgtggtatctagcagagttgatccaaggctcagctgggaggcagggggtgggggatagcgcccatactgatctcccctcctgggcagtactggtgcgataccagcgggaggatggcaaagtccacgccgtgaacctacagcaagcgggcctggctgatgggcgcacacacacagttctcctgcgactccgaggtccctccagacccagccctgccctacatctctacgtggactgcaaactgggtgaccaacatgcaggccttccagcactggcccccattcctccagcggaggtcgatgggctggagattaggactggacagaaggcgtatttgaggatgcaggtgagccgggaggagcctctgagttctgtggaaatagagtttgcaccagctggggaaggggttggtagaccttcccaccttactctgctgctatccccccagggctttgtggaatctatgaaaattattctgggtgggtccatggcccgggtaggagccctgagtgagtgtccattccaaggggacgagtccatccacagtgcaggtaacacagagacttgtttgctgacattggaccacggatcctgtggcctttggtgactcctgtcttcttgatctccctctcccttaaaacccattcctttggctcacctgttcctagggtttctaaccctgttattccaaatctttcacctgactccacaatctccaatacacccatccgagaaaaaaagtgatctaagagaagaattggttaattgcttggccttggctgaccaagagatactggtctcgagtattttttttttttttggtgatggagtcttgtcctgttgcccaggccggagtgcagtggtgcaatctgggtcactgcagtctccactgagttcaagtgattctcctgcctcagcctcccaagcagctgggattacaggcggccctccaccatgcctagctaattttgcatttttagtagagatgggatttcaccacgttggccaggctggtctcaaacacctaatctcaagtgatgcacccacctcggcctctcaaagtgctgggattacaggcgtaagccaccgcgcccggcctggtctcgagtcttttatagttctcactggcagctgtcaccagcaatttctctgagtgttgcccatctgcctggtctctctgacagggatgttcagaagctctcacctaaataaaagacccacctttcccagatatttgagggagagctcttgaagaagggaatgggatggcgggtgtggtggctcacacctgtaatcccagcactttgggaggctgaggtgggctgatccctcaaggtccggagttcaagaccagcctggccaacactgtgaaacctcctctctactaaaaaatacaaaaaattagctgggcatggtggtgggcacctgtagtcccagctacttgggaggcggaggcaggagagttgcttgaacccaggaggtggaggttgtggtgagcagagatcacgccactgcattccagcctgggaaacagagcaagactccgactcaaaaaaaaaaaaaatggggatatactggggccctggccctgctttgggtccatcccttctgccactaccatgcctaggaaccaggaggatttgggttctaacttcctgtgaagcaactcccttagagggccttttgccccatagaaggagctggcactgcttgtctgccagctctgccctcccagcatccagcaccccatctttattctggggctccagccctgtccctgtcctcaccttccttcctccttctcaccaaccaggcctctcttcacttcacctcacccctctgactatgttttcttctcctctccagtgaccaatgcactgcactccattctaggtgagtaggccacactgaagcggaagcggggagcggggaggaggccccaggctctggcagctgcctgaaactaagtcctcttcagtcaggaatgtagtaggtttaaaggcaggggtgggcagccgtggcaggtactggcttattgcccatggagggcccaggactggtgctccagtactgaacccctcacaccctgggtcccgacaggggagcagaccaaggcgctggtcacccaactcaccctcttcaaccagatcctggtggagctgcgggatgatatacgagaccaggtttgggtgggctggcgaagggtggcactgattctggggtagggtggcagatgtcaagtgctgactcctccccatccttctccaggtgaaggaaatgtccctgatccgaaacaccattatggagtgtcaggtgtgcggtgagtgggagagcaggggaggctccacatgaccgtgccacgttcccaccattggctttggctttcccttctggtggcttaaatagtgaccaccgggtagctctgactgtgtccacccctcaggcttccatgagcagcgttcccactgcagccccaatccctgcttccgaggtgtggactgcatggaagtgtacgagtacccaggctaccgctgtgggccctgcccccctggcctgcagggcaacggcacccactgcagtgacatcaatgaggtgagggaggtcagagcccagaagggtacagaaaactggggtgaggatgtcaggaggcacccaagagggtgggataaatgctggtccggaggagaggaatctggagtttaggagaggtcagaggcaagagaaatgcaagatgggagagacagaaggcctggggcaaagactgaaggccatacagggaaggagctggggaaactgcaggggaggcttgagatggcgaccagtggcatggggagggagagagggaaccccgagggaagtggggtggggaccaggagcacaaggcagttgtgtggggagagctgcacaaaggggagacctggagcaatggttcctggatcacaggcagggacctgagtttcccagagggcggcctgacctctgccttctcatctggtccccagtgtgctcacgctgacccctgtttcccgggctccagctgcatcaacaccatgcccggcttccactgtgaggcctgtcctcgagggtacaagggcacacaggtgtctggtgtgggcattgactatgcccgggccagcaaacaggtcagactgggtagtgtgtgtggacaagggatcttggccttgtagaggccaggggcttctgggttggacatgggacccttgtgatgaatgggacatggatggctttgcatcggctttgggtctgggcttaatgttgatgttcacagataaggccataccagtgtcctctgctgtatctgaggagacccaccataggtctggttccacccaaagtctgccccttcaggtctgcaatgacatcgatgaatgcaacgatggcaacaatggtggctgtgacccaaactccatctgcaccaacactgtggtgagctgaatatcctgagtgtattctggggtggtgggaatggtaaaaccccaacccccgccccttcttaccttcaaatttcctgctgcctttcctcctccccagggcactacacagattaggtgttcacatggacttggtttggaatactggtttgcctcttgctagctctttagcaggttatttaacttttctgagcctcagcttcctcatctgaaaactgaggctgttatccaccctgaaaggttgtcatgataacctaaaggagatactgatatgcctggcataactgagtgcccagcccacactccgcaggtggagcagtgctggtcctgggtgcctggtgggctcaccctccttcctaagatgctgcctctccactcttagggctctttcaagtgtggtccctgccgcctgggtttcctgggcaaccagagccagggctgcctcccagcccggacctgccacagcccagcccacagcccctgccacatccatgctcactgtctctttgaacgcaatggtgcagtgtcctgccaggtgagctaggcttcaggcgtggaaggaaaagggagggtctggggaaaggagtagggctatgtttagggcctgggttgggggtcttcataggagagaaggtgggcctgggcccaggaactgtttggtggggagaataggacctgaagcagggaaaatatagggaggaggggagccagaccaaactgctagctcctaccctttgtgttgccctagtgtaacgtgggctgggctgggaatgggaacgtgtgtgggactgacacagacatcgatggctacccagaccaagcactgccctgcatggacaacaacaaacactgcaaacaggtgcagggagcaggcgggcaagggggcgtagtggggagcccaagctgggtcaggccagaactcatccatcctcttcccctgaactttaggacaactgccttttgacacccaactctgggcaggaagatgctgataatgatggtgtgggggaccagtgtgatgatgatgctgatggggatgggatcaagaatgttgaggtgactcccagactgccctgccccttgaagctcctctcccctcctcctgtcctctctgtgcctcacttacctcatctggcagctctctagtaagggccaaatactccaaatcagggaggcaaaaacctcgtgcccaggacaaggaggctgggtgggtgggactgtactgagcagtttgtccatcacaagggtgtgatcttagaaaaggatacagagacaaggtaggtgcaagatgacaagtgatttaggggagacctgacccttcccctcccaccctctgcccaggacaactgccggctgttccccaacaaagaccagcagaactcagatacagattcatttggtgatgcctgtgacaattgccccaacgttcccaacaatgaccagaaggacacagatggcaatggggaaggagatgcctgtgacaacgacgtggatggggatggtgcaggcctggggctgaaggggtggctgggggacctgtgagaatttggatcaggtggggatgaagcagggaagctaggaagtctctgtgaaatagggaggcaggcttgtggacgttggcctgggtgaggagagattacctgcagcagatgtcaataggaatgtgaggtagggcgtagtgttaggcagagtgtggactagagggtgagacaagaaacaggcagatttcctggccagttgtcctctgggtggggagacaaagttcgggactttcaccaacctagaagagagaatatggcatgttctagtaacaaccttgtgctacccatgtcttctaggcatccccaatggattggacaattgccctaaagtccccaacccactacagacagacagggatgaggacggggtgggagatgcttgcgacagctgccctgaaatgagcaatcctacccaggtacagggagatggtaaggacaggggagggatgagggtactgatggatgaagccccagccctttggatggaaagtggtcagatcaccctcttcagagttatcaagaggagatggtgagaacaggtccctctctctcagacagatgcagacagcgacctggtgggggatgtctgtgatactaatgaagacaggtaaggtcttggtcaagagacgcaaggtctttcttttttttgtctttctgagacggcttgctctgtcacctaggctggagtacagtggcacgatcttggctcactgcaacctccgtctcccagggtcaagtgattctcatgcctcaacctccctgagtggctaggattacaggcatgtgctaccaagcccagctaattcttgtattttcagtagagacagggtttcaccatgttggccaggctggtctcgaactccttacctcaggtgatccgccagcctctgcctcccaaagtgctgtgattacaggtgtgagccactgtgccagcgaaatgcaaggtcttataggggatattttactttcctctagtatatccttttttttttttttttgagacggagtcttgctctgtcgcccaggctggagtacagtggcatgatctcggctcactgcaagctccacctcccgagttcacgccattcttctgcctcagcctcccaagtagctgggactacaggcgcctgccaccacgcccggctaattttttgtgtttttagtagagacggggtttcactgtgttaaccaggatggtctcgatctcctgatctcgtgatttgcctgcctcagcctcccaaagtgctgggattacaggcgtgagccaccgtgcccggcctcctttttttttttgagatggagtcttgctctgtcactcaagctggagtgcagtgatatcggctcactgcgacctccacctccagggttcaagcgattttcctgcctcagcctcccagtagctggattacaggcgcgtgctaccaagctcagctaatttttgtgtttttagtagagacagggtttcatcgtgttggccaggctggtctcgaactcctgacctcaggtgatctgcccgccttggcctcccaaagtactgggaatacaggcatgagccactgtgcccaggccatagtatattctaaattccttctatgatttagccttaattctctattgctattcagcaggaatttattcttacagtcatccctccattcctactgccagaccttcacctcacctggctgactgccaggggtctgattgtatggagagcaggctccagagactcccaggcagaagcgaagggaaggacaaggagtacctttaaatcctttatttggtacctgttcttctgattagcgatggggatgggcatcaggacaccaaggacaactgcccacagctgccaaatagctcccagctggactctgataacgatggacttggagatgagtgtgatggggatgatgacaatgatggcatcccagattatgtgcctcctggtcccgataactgccgcctggtacccaatcccaatcagaaggactcagatggtaagcctgcggacccagagcacgttagactggtgttgcctttgcccaggtggaggcagcaagccctgttgggaagtgaggaagggcaaggtgggaaagatgtcaggaatgcaggcccaacagatggtattgttgcctaatggcagtggccagggccttcctgagcacccagcctcactctgcccaggcaatggcgttggtgatgtgtgtgaggatgactttgacaatgatgctgtggtcgaccccctggatgtgtgtcctgaaagtgcagaggtaacgcttacggattttcgggcctatcagaccgtcgtcctggatcc

SEQ ID NO: 22724 - DNA, 2110 bp, Homo Sapiens
ggcacgaggcggggccgagcgccgcgcgtcccgagcatggcaggctccctgcctccctgcgtggtggactgtggcaccgggtataccaagcttggctacgcaggcaacactgagccccagttcattattccttcatgtattgccatcagagagtcagcaaaggtagttgaccaagctcaaaggagagtgttgaggggagttgatgaccttgactttttcataggagatgaagccatcgataaacctacatatgctacaaagtggccgatacgacatggaatcattgaagactgggatcttatggaaaggttcatggagcaagtggtttttaaatatcttcgagctgaacctgaggaccattattttttaatgacagaacctccactcaatacaccagaaaacagagagtatcttgcagaaattatgtttgaatcatttaacgtaccaggactctacattgcagttcaggcagtgctggccttggcggcatcttggacatctcgacaagtgggtgaacgtacgttaacggggatagtcattgacagcggagatggagtcacccatgttatcccagtggcagaaggttatgtaattggaagctgcatcaaacacatcccgattgcaggtagagatattacgtatttcattcaacagctgctaagggagagggaggtgggaatccctcctgagcagtcactggagaccgcaaaagccattaaggagaaatactgttacatttgccccgatatagtcaaggaatttgccaagtatgatgtggatccccggaagtggatcaaacagtacacgggtatcaatgcgatcaaccagaagaagtttgttatagacgttggttacgaaagattcctgggacctgaaatattctttcacccggagtttgccaacccagactttatggagtccatctcagatgttgttgatgaagtaatacagaactgccccatcgatgtgcggcgcccgctgtataagaatgtcgtactctcaggaggctccaccatgttcagggatttcggacgccgactgcagagggatttgaagagagtggtggatgctaggctgaggctcagcgaggagctcagcggcgggaggatcaagccgaagcctgtggaggtccaggtggtcacgcatcacatgcagcgctacgccgtgtggttcggaggctccatgctggcctcgactcccgagttctttcaggtctgccacaccaagaaggactatgaagagtacgggcccagcatctgccgccacaaccccgtctttggagtcatgtcctagtgtctgcctgaacgcgtcgttcgatggtgtcacgttggggaacaagtgtccttcagaacccagagaaggccgccgttctgtaaatagcgacgtcggtgttgctgcccagcagcgtgcttgcattgccggtgcatgaggcgcggcgcgggcccttcagtaaaagccatttatccgtgtgccgaccgctgtctgccagcctcctccttctcccgccctcctcacctcgctctccctcctcctcctcctccgagctgctagctgacaaatacaattctgaaggaatccaaatgtgactttgaaaattgttagagaaaacaacattagaaaatggcgcaaaatcgttaggtcccaggagagaatgtgggggcgcaaacccttttcctcccagcctatttttgtaaataaaatgtttaaacttgaaatacaaatcgatgtttatatttcctatcattttgtattttatggtatttggtacatctggctgatactaagcacgaatagatattgatgttatggagtgctgtaatccaaagtttttaattgtgaggcatgttctgatatgtttataggcaaacaaataaaacagcaaacttttttgccacatgtttgctagaaaatgattatactttattggagtgacatgaagtttgaacactaaacagtaatgtatgagaattactacagatacatgtatcttttagttttttttgtttgaactttctggagctgttttatagaagatgatggtttgttgtcggtgagtgttggatgaaatacttccttgcaccattgtaataaaagctgttagaatatttgt

SEQ ID NO: 22725 - DNA, 5062 bp, Homo Sapiens
cactaacgctcttcctagtccccgggccaactcggacagtttgctcatttattgcaacggtcaaggctggcttgtgccagaacggcgcgcgcgcgacgcacgcacacacacggggggaaacttttttaaaaatgaaaggctagaagagctcagcggcggcgcgggccgtgcgcgagggctccggagctgactcgccgaggcaggaaatccctccggtcgcgacgcccggccccgctcggcgcccgcgtgggatggtgcagcgctcgccgccgggcccgagagctgctgcactgaaggccggcgacgatggcagcgcgcccgctgcccgtgtcccccgcccgcgccctcctgctcgccctggccggtgctctgctcgcgccctgcgaggcccgaggggtgagcttatggaaccaaggaagagctgatgaagttgtcagtgcctctgttcggagtggggacctctggatcccagtgaagagcttcgactccaagaatcatccagaagtgctgaatattcgactacaacgggaaagcaaagaactgatcataaatctggaaagaaatgaaggtctcattgccagcagtttcacggaaacccactatctgcaagacggtactgatgtctccctcgctcgaaattacacggtaattctgggtcactgttactaccatggacatgtacggggatattctgattcagcagtcagtctcagcacgtgttctggtctcaggggacttattgtgtttgaaaatgaaagctatgtcttagaaccaatgaaaagtgcaaccaacagatacaaactcttcccagcgaagaagctgaaaagcgtccggggatcatgtggatcacatcacaacacaccaaacctcgctgcaaagaatgtgtttccaccaccctctcagacatgggcaagaaggcataaaagagagaccctcaaggcaactaagtatgtggagctggtgatcgtggcagacaaccgagagtttcagaggcaaggaaaagatctggaaaaagttaagcagcgattaatagagattgctaatcacgttgacaagttttacagaccactgaacattcggatcgtgttggtaggcgtggaagtgtggaatgacatggacaaatgctctgtaagtcaggacccattcaccagcctccatgaatttctggactggaggaagatgaagcttctacctcgcaaatcccatgacaatgcgcagcttgtcagtggggtttatttccaagggaccaccatcggcatggccccaatcatgagcatgtgcacggcagaccagtctgggggaattgtcatggaccattcagacaatccccttggtgcagccgtgaccctggcacatgagctgggccacaatttcgggatgaatcatgacacactggacaggggctgtagctgtcaaatggcggttgagaaaggaggctgcatcatgaacgcttccaccgggtacccatttcccatggtgttcagcagttgcagcaggaaggacttggagaccagcctggagaaaggaatgggggtgtgcctgtttaacctgccggaagtcagggagtctttcgggggccagaagtgtgggaacagatttgtggaagaaggagaggagtgtgactgtggggagccagaggaatgtatgaatcgctgctgcaatgccaccacctgtaccctgaagccggacgctgtgtgcgcacatgggctgtgctgtgaagactgccagctgaagcctgcaggaacagcgtgcagggactccagcaactcctgtgacctcccagagttctgcacaggggccagccctcactgcccagccaacgtgtacctgcacgatgggcactcatgtcaggatgtggacggctactgctacaatggcatctgccagactcacgagcagcagtgtgtcacactctggggaccaggtgctaaacctgcccctgggatctgctttgagagagtcaattctgcaggtgatccttatggcaactgtggcaaagtctcgaagagttcctttgccaaatgcgagatgagagatgctaaatgtggaaaaatccagtgtcaaggaggtgccagccggccagtcattggtaccaatgccgtttccatagaaacaaacatccccctgcagcaaggaggccggattctgtgccgggggacccacgtgtacttgggcgatgacatgccggacccagggcttgtgcttgcaggcacaaagtgtgcagatggaaaaatctgcctgaatcgtcaatgtcaaaatattagtgtctttggggttcacgagtgtgcaatgcagtgccacggcagaggggtgtgcaacaacaggaagaactgccactgcgaggcccactgggcacctcccttctgtgacaagtttggctttggaggaagcacagacagcggccccatccggcaagcagataaccaaggtttaaccataggaattctggtgaccatcctgtgtcttcttgctgccggatttgtggtttatctcaaaaggaagaccttgatacgactgctgtttacaaataagaagaccaccattgaaaaactaaggtgtgtgcgcccttcccggccaccccgtggcttccaaccctgtcaggctcacctcggccaccttggaaaaggcctgatgaggaagccgccagattcctacccaccgaaggacaatcccaggagattgctgcagtgtcagaatgttgacatcagcagacccctcaacggcctgaatgtccctcagccccagtcaactcagcgagtgcttcctcccctccaccgggccccacgtgcacctagcgtccctgccagacccctgccagccaagcctgcacttaggcaggcccaggggacctgtaagccaaacccccctcagaagcctctgcctgcagatcctctggccagaacaactcggctcactcatgccttggccaggaccccaggacaatgggagactgggctccgcctggcacccctcagacctgctccacaatatccacaccaagtgcccagatccacccacaccgcctatattaagtgagaagccgacaccttttttcaacagtgaagacagaagtttgcactatctttcagctccagttggagttttttgtaccaacttttaggattttttttaatgtttaaaacatcattactataagaactttgagctactgccgtcagtgctgtgctgtgctatggtgctctgtctacttgcacaggtacttgtaaattattaatttatgcagaatgttgattacagtgcagtgcgctgtagtaggcatttttaccatcactgagttttccatggcaggaaggcttgttgtgcttttagtattttagtgaacttgaaatatcctgcttgatgggattctggacaggatgtgtttgctttctgatcaaggccttattggaaagcagtcccccaactacccccagctgtgcttatggtaccagatgcagctcaagagatcccaagtagaatctcagttgattttctggattccccatctcaggccagagccaaggggcttcaggtccaggctgtgtttggctttcagggaggccctgtgccccttgacaactggcaggcaggctcccagggacacctgggagaaatctggcttctggccaggaagctttggtgagaacctgggttgcagacaggaatcttaaggtgtagccacaccaggatagagactggaacactagacaagccagaacttgaccctgagctgaccagccgtgagcatgtttggaaggggtctgtagtgtcactcaaggcggtgcttgatagaaatgccaagcacttctttttctcgctgtcctttctagagcactgccaccagtaggttatttagcttgggaaaggtggtgtttctgtaagaaacctactgcccaggcactgcaaaccgccacctccctatactgcttggagctgagcaaatcaccacaaactgtaatacaatgatcctgtattcagacagatgaggactttccatgggaccacaactattttcagatgtgaaccattaaccagatctagtcaatcaagtctgtttactgcaaggttcaacttattaacaattaggcagactctttatgcttgcaaaaactacaaccaatggaatgtgatgttcatgggtatagttcatgtctgctatcattattcgtagatattggacaaagaaccttctctatggggcatcctctttttccaacttggctgcaggaatctttaaaagatgcttttaacagagtctgaacctatttcttaaacacttgcaacctacctgttgagcatcacagaatgtgataaggaaatcaacttgcttatcaacttcctaaatattatgagatgtggcttgggcagcatccccttgaactcttcactcttcaaatgcctgactagggagccatgtttcacaaggtctttaaagtgactaatggcatgagaaatacaaaaatactcagataaggtaaaatgccatgatgcctctgtcttctggactggttttcacattagaagacaattgacaacagttacataattcactctgagtgttttatgagaaagccttcttttggggtcaacagttttcctatgctttgaaacagaaaaatatgtaccaagaatcttggtttgccttccagaaaacaaaactgcatttcactttcccggtgttccccactgtatctaggcaacatagtattcatgactatggataaactaaacacgtgacacaaacacacacaaaagggaacccagctctaatacattccaactcgtatagcatgcatctgtttattctatagttattaagttctttaaaatgtaaagccatgctggaaaataatactgctgagatacatacagaattactgtaactgattacacttggtaattgtactaaagccaaacatatatatactattaaaaaggtttacagaattttatggtgcattacgtgggcattgtctttttagatgcccaaatccttagatctggcatgttagcccttcctccaattataagaggatatgaaccaaaaaaaaaaaaaaaaaaa

SEQ ID NO: 22726 - DNA, 3328 bp, Homo Sapiens
cactaacgctcttcctagtccccgggccaactcggacagtttgctcatttattgcaacggtcaaggctggcttgtgccagaacggcgcgcgcgcgacgcacgcacacacacggggggaaacttttttaaaaatgaaaggctagaagagctcagcggcggcgcgggccgtgcgcgagggctccggagctgactcgccgaggcaggaaatccctccggtcgcgacgcccggccccgctcggcgcccgcgtgggatggtgcagcgctcgccgccgggcccgagagctgctgcactgaaggccggcgacgatggcagcgcgcccgctgcccgtgtcccccgcccgcgccctcctgctcgccctggccggtgctctgctcgcgccctgcgaggcccgaggggtgagcttatggaaccaaggaagagctgatgaagttgtcagtgcctctgttcggagtggggacctctggatcccagtgaagagcttcgactccaagaatcatccagaagtgctgaatattcgactacaacgggaaagcaaagaactgatcataaatctggaaagaaatgaaggtctcattgccagcagtttcacggaaacccactatctgcaagacggtactgatgtctccctcgctcgaaattacacggtaattctgggtcactgttactaccatggacatgtacggggatattctgattcagcagtcagtctcagcacgtgttctggtctcaggggacttattgtgtttgaaaatgaaagctatgtcttagaaccaatgaaaagtgcaaccaacagatacaaactcttcccagcgaagaagctgaaaagcgtccggggatcatgtggatcacatcacaacacaccaaacctcgctgcaaagaatgtgtttccaccaccctctcagacatgggcaagaaggcataaaagagagaccctcaaggcaactaagtatgtggagctggtgatcgtggcagacaaccgagagtttcagaggcaaggaaaagatctggaaaaagttaagcagcgattaatagagattgctaatcacgttgacaagttttacagaccactgaacattcggatcgtgttggtaggcgtggaagtgtggaatgacatggacaaatgctctgtaagtcaggacccattcaccagcctccatgaatttctggactggaggaagatgaagcttctacctcgcaaatcccatgacaatgcgcagcttgtcagtggggtttatttccaagggaccaccatcggcatggccccaatcatgagcatgtgcacggcagaccagtctgggggaattgtcatggaccattcagacaatccccttggtgcagccgtgaccctggcacatgagctgggccacaatttcgggatgaatcatgacacactggacaggggctgtagctgtcaaatggcggttgagaaaggaggctgcatcatgaacgcttccaccgggtacccatttcccatggtgttcagcagttgcagcaggaaggacttggagaccagcctggagaaaggaatgggggtgtgcctgtttaacctgccggaagtcagggagtctttcgggggccagaagtgtgggaacagatttgtggaagaaggagaggagtgtgactgtggggagccagaggaatgtatgaatcgctgctgcaatgccaccacctgtaccctgaagccggacgctgtgtgcgcacatgggctgtgctgtgaagactgccagctgaagcctgcaggaacagcgtgcagggactccagcaactcctgtgacctcccagagttctgcacaggggccagccctcactgcccagccaacgtgtacctgcacgatgggcactcatgtcaggatgtggacggctactgctacaatggcatctgccagactcacgagcagcagtgtgtcacactctggggaccaggtgctaaacctgcccctgggatctgctttgagagagtcaattctgcaggtgatccttatggcaactgtggcaaagtctcgaagagttcctttgccaaatgcgagatgagagatgctaaatgtggaaaaatccagtgtcaaggaggtgccagccggccagtcattggtaccaatgccgtttccatagaaacaaacatccccctgcagcaaggaggccggattctgtgccgggggacccacgtgtacttgggcgatgacatgccggacccagggcttgtgcttgcaggcacaaagtgtgcagatggaaaaatctgcctgaatcgtcaatgtcaaaatattagtgtctttggggttcacgagtgtgcaatgcagtgccacggcagaggggtgtgcaacaacaggaagaactgccactgcgaggcccactgggcacctcccttctgtgacaagtttggctttggaggaagcacagacagcggccccatccggcaagcagaagcaaggcaggaagctgcagagtccaacagggagcgcggccagggccaggagcccgtgggatcgcaggagcatgcgtctactgcctcactgacactcatctgagccctcccatgacatggagaccgtgaccagtgctgctgcagaggaggtcacgcgtccccaaggcctcctgtgactggcagcattgactctgtggctttgccatcgtttccatgacaacagacacaacacagttctcggggctcaggaggggaagtccagcctaccaggcaggtctgcagaaacagtgcaaggaagggcagcgacttcctggttgagcttctgctaaaacatggacatgcttcagtgctgctcctgagagagtagcaggttaccactctggcaggccccagccctgcagcaaggaggaagaggactcaaaagtctggcctttcactgagcctccacagcagtgggggagaagcaagggttgggcccagtgtcccctttccccagtgacacctccgccttggcagccctgatgactggtctctggctgcaacttaatgctctgatatggcttttagcatttattatatgaaaatagcagggttttagtttttaatttatcagagaccctgccacccattccatctccatccaagcaaactgaatggcattgaaacaaactggagaagaaggtaggagaaagggcggtgaactctggctctttgctgtggacatgcgtgaccagcagtactcaggtttgagggtttgcagaaagccagggaacccacagagtcaccaacccttcatttaacaagtaagaatgttaaaaagtgaaaacaatgtaagagcctaactccatcccccgtggccattactgcataaaaatagagtgcattttgaaataaaaaaaaaaaaaaaa

SEQ ID NO: 22727 - DNA, 1377 bp, Homo Sapiens
agcatcctgagtaatgagtggcctgggccggagcaggcgaggtggccggagccgtgtggaccaggaggagcgctttccacagggcctgtggacgggggtggctatgagatcctgccccgaagagcagtactgggatcctctgctgggtacctgcatgtcctgcaaaaccatttgcaaccatcagagccagcgcacctgtgcagccttctgcaggtcactcagctgccgcaaggagcaaggcaagttctatgaccatctcctgagggactgcatcagctgtgcctccatctgtggacagcaccctaagcaatgtgcatacttctgtgagaacaagctcaggagcccagtgaaccttccaccagagctcaggagacagcggagtggagaagttgaaaacaattcagacaactcgggaaggtaccaaggattggagcacagaggctcagaagcaagtccagctctcccggggctgaagctgagtgcagatcaggtggccctggtctacagcacgctggggctctgcctgtgtgccgtcctctgctgcttcctggtggcggtggcctgcttcctcaagaagaggggggatccctgctcctgccagccccgctcaaggccccgtcaaagtccggccaagtcttcccaggatcacgcgatggaagccggcagccctgtgagcacatcccccgagccagtggagacctgcagcttctgcttccctgagtgcagggcgcccacgcaggagagcgcagtcacgcctgggacccccgaccccacttgtgctggaaggtgggggtgccacaccaggaccacagtcctgcagccttgcccacacatcccagacagtggccttggcattgtgtgtgtgcctgcccaggaggggggcccaggtgcataaatgggggtcagggagggaaaggaggagggagagagatggagaggaggggagagagaaagagaggtggggagaggggagagagatatgaggagagagagacagaggaggcagaaagggagagaaacagaggagacagagagggagagagagacagagggagagagagacagaggggaagagaggcagagagggaaagaggcagagaaggaaagagacaggcagagaaggagagaggcagagagggagagaggcagagagggagagaggcagagagacagagagggagagagggacagagagagatagagcaggaggtcggggcactctgagtcccagttcccagtgcagctgtaggtcgtcatcacctaaccacacgtgcaataaagtcctcgtgcctgctgctcacagcccccgagagcccctcctcctggagaataaaacctttggcagctgcccttcctcaaaaaaaaaaaaaaaaaaaa

SEQ ID NO: 22728 - DNA, 9288 bp, Homo Sapiens
ctcacgcctgtaatcccagcactttgggatgccaaggtgggaggaatcagctgagatcaggagtttgagaccagcctgaccaacatggataaatcccgtctctactaaaaatacaaaattagccaggcgtgggtggcacatgcctgtaatctcagctactcaggcggttgaggcaggagaattgcttgaacccgggaggcggaggttgcagtgagccaagatggcaccattgcactccagcctgggcaacaagagcgaaactccatctcaaaaacaaagaaaaaaagataatagccatcctaatggatgtgaagtggttcaatgtatatctttttatttgtataacttctttcaaaatgtatataattattttgtgtatatgtaatttgttttacatagtagcattatgctattcctttccctctgtgtcttactattttctgttggaactgtgtttaaaatctatacatttgttttatgtacatggaattcattgcttctcacttttgcatagcactttatggtatgcatgaatcacatccatgtatattgagaacctactatgtgcttgtaccaagctttctatatgatttaatctgattccatacagcaatcctaagaaggtgttgtaattatcacattttatggatgagaaaactgacacacacagagttaaggaacgtgcccagagtcacacagccggaagtggaagaggtagaagtttaacccaggtcattctggtgccacagaagagctcacacgtgtaaggtgttacaaagagctataggtagagatctgactgtagacagaggctctctcttaggtgagggcactctgataaaagttctagtcctgatttggctacttatcttcacagtgcaaatcaccttcccttacagacatcactttctgtctgtgtaagatgaagatgattttaatgctttttctagattcactacttgttgattaaatacccttaagctaatgggaaaataatcagaattgaagtcaggtgtttgtttctttcgtgtatttggagtggctggcctacctgggagccactccaaatacacgaaaaccctctgatgtgtctattcacgaggtgaactgttcataggatggactattcccagggaaacagttgctgtctccacttccatcccacctctcctgaactttgcacttaccatggtgaaaaattaactgggctaatgtttccctcccaaggacaacctctgcaaaagcaggtatggctgggccccaaaagaccaggtgccagaacagagttgtacccatccagagcagcccacccattcactgcccaaagtcaagatcaagagaacatgcagggtcttctcagcactggaagaatcagttcctcagccctcctcagagctttctgaaactggacttagtcccccagtggagggacttctcttggagaaacaggcctgaggagaaagaactagcccagaaatggcacttattagacttgtaggtgggtccagcactatttttctgcatgcacagctgttcttgtcacacggatgccagcagggaagcatggttctgccacactaactagctggctgcctagttatttcctcccctcaggaaaatgagagggctgaatgagggccccttcccataccatgattttacagggtgaagtacctgtcaggtccttctactacatgtaatcctcacatctctctgacgctcttcctctacagtgcaaatcactctccttcagcagacattgctctctctgtaacataaaggacttgaactacaggaggacagttacaatgctctttctggatccaccactctgcacagtgagaaccgcttgctccattcttacagcggagagaacggacgctgcccaaggggaagaagagaaagagccgggattggaagccaggccagtcactgatggatcctgagcccctcttactttctttggctacctctcaatggttggacttgttcaggttaagattaacactttactggacgatgatgactgcaaggcccctgcccatctttgcccactcagtcacatcatcctcatccccaccctttgatgcttctctaggctgtgaacgccttgaaaaccttagtcttttattttggaagttcaggaactgaataggagggctgcaactcagagctgctccgtcaatgtgtgttaaacttatttgacctccctccaccacttttcatggcattagcaatgcaaaccttttcacatgagcttcccacagccaccctaggagatcgcgagggaagccacctctagccccattttacaggtgagcaaataatccttgcagtgttacaacagtgtgcccgtgtagagaactgttttgcaaagagctcgatcaatgatgtcatctttgccttccgtgacccaggcagctgggtgcagtctcaagatcgtagactgaggcttcaacaaagtattgggttcaaattccagctctgccacttggaaccctgagtaagtaatgtaatctctctgtgcctccgtaaacgtgaggcacaggaacatctacctcaccaaccactgttaagactgaatcaaagggcagcaggcggactacccggaatgaagaaagcaatcaataaatgtggattgtgtcatccttgtctctcttgacggacgggaagaggagagtgaaacctaagaccacagcggaagcgcgttaacaggaggaccagcaaggaacggaagccaggttgtcaagcctcagttggctttcacgtattctccttttcaggcgggtatttaggaagagaggagggtgaggagcacagcgcacttctgcagcagcagctgcggattggcttgtgggaggcggttctccggagcaaggcaagggcccctgccgcttctgggctgactgtggattccgccacacctcacagggctttgtaactccccacccacttgagggttccagataactttttttttttaacaaagcaggggtgggggtgggagattcctgctgttaaaaacaaacaaagggcttagacaccggctagtcggctgcgggaggcagcaagagaaaggccgaggggcctggagtagctcctgaaaaccgccgagggccctgcgggcagacgcccctgaattcttttggtggggagaaaagccgcggagctccccaatgtgccaattggtttgttgttgttttgctttttttgaatacacaaactctccgaaaactcctgtcttgccccacttttttgtgagttcattgctttggaaacaaaactctcttccatttattggcaattatcaaatttccgatccttctctatcaggagatccagcaacaaacaccctgttatgtaaatttctttcaaagataaattcgaaagcccctccattcattccttcaagaactcaacagatgtccttgaggctcattttctgccgggcactcggttcacaaggctcaagagacccctggctccagccattgtccaggttgtcactggtgtccccagctctccacttctgaggacccacttctcaccccctcctcctccgcacacgttcccgaggctctcggccggtgtgatctcaccgactagagaataaaaacagcccaggggcgccggcgccggccaagggccttgacggggatcagcaagcgcgaggccaagtgcgggccccaacttcctgggcccgggccttccgcgcgccccctctcgggctcgggtcctctccagggtgcactcgcgtccggacgacgcttacttgctgcgagtccaaccctctccggcccgcaactccaaccgagccgcccgagtgtggactccgagagcggacgccacgggccgcgctcagccctcccgcccgaggcccctctcgccgtgtttcccaggacttcctccccgcgcccgcccgacttcaggtcggggccgcgcagggtcccgcgcgctccagccaggactgccgccgcccgggtcgcccacgtgggcgtgctgggcgcggggtggtggccggccgggcgccctccccggagcagggggcgggcagggcgcccgcgggaggaggtggcgggctgcgggggaggaggcggggagccccggcggcgagggggcggtgacagcacttggaaaggaggctgcacgcggatttgcatgaaacacagactgggagcgggcgggagcgggagcgcggcgcacgccccgggccggcccagccagcgagcgagcgagcggcgagccgggaggaggagggtggcggggcggtgaggccgcagaggcggagggatctgcgcatcaaagctagcgaggcgagcgaagtttggccgggggttggactttccttcccggaggcggcacccaaacagctaccccgtgcggaaacccaaacttctgctgccacttggagtctcgcggccgccgcctccgccccgcgttcggggccttcccgaccctgcactgctgccgtccgcccgcccggccgctcttctcttcgccgtgggagccgctccgggcgcagggccgcgcgccgagccccgcaggctgcagcgccgcggcccggcccggcgccccggcaacttcgccgagagttgaggcgaagtttgggcgaccgcggcaggccccggccgagctcccctctgcgcccccggcgtcccgtcgagcccagccccgccgggggcgctcctcgccgcccgcacgccctccccagccatgtcgtccatcctgcctttcactcccccgatcgtgaagcgcctgctgggctggaagaagggcgagcagaacgggcaggaggagaaatggtgcgagaaggcggtcaagagcctggtcaagaaactcaagaagacggggcagctggacgagctggagaaggccatcaccacgcagaacgtcaacaccaagtgcatcaccatccccaggtgggggcccgcccgggggggacccggggtcacgccggcccagccccctggcactgcggggccgacccagtggggctggagatgggaagagggagagagagggagggagtgagactgtgtgggtgcgtgtgtgtgagagtgggagagcgcgggcaggaagggggtggggggacccaaacaaaaccatctctgatttgcaaagatcagagcccgaggcttccacgcggcactctggcttccacacctcacattccctttccacctccgggaggggagagcgggttgctgcgggactcggccgcccccactccggggagctggggctggaagttgaggcccgctttgttcggctccgcgggccggagcccctcctccgccgccgcctcccgcccccgcggcccgcgctcgtggaggtggtggtgtctttgcgtttcttttcttcagtcgggtctccccactttcctctacaggaatgcggtccgtacagctggggctgtgggtgaggagcgggagcctagtgattgacagattccttcttcgttctttctttgccttcgggattagcatttttatcgagtatttttagactcggttgtgccagtctcccgccccctgagcatgcacgcactttggttgcagtgcaatgctctgacttccaaatgggagagacaagtggcggaaaatagggtcttctcccacctcccacccccccatcccgactcttttgcccttcttttggtccaagagattttgaaaccgtgcagaacgagggagaggggcaggctgcagccgggcagataacaaaacacaccccaaagtgggcctcgcatcggccctcgcattcctgtagagccttccttcccaaagcgcgctgccatctgtctggatctcctttatccttcccgttgcgcgctagctaggtcgggcgggagcacagatggctgatagaaggggtcagtgacttcactcccccagggccttccttagcttagatgtgcctggctgggaactgggggtgcgggtaccttggcttcctatctctacctctcagcctcctttgatgctgaaccaagggagagagcgtgtgtgttgggggctggctcttttgggggtcccaggctgccgaggaatgagtagaaagcaccagggactgtcagccgcaaagggattgtcatccctgcccctgggccagggtggactccatccttggccacctgcttggggcagttgtacaggggctgccaggcgagtcaggcaggcacaaagcaacatctgtccacgggaaccgagggcaggcctcccctggaaataaatgccacatatggtgggagtgcggacttaaattttttttaactgggtggatccagtcaataaagggggagggaaggcggtgtgctgtctggggaagtctctgggcgtgtgatcgggagccagaattgacttcagaggaggtggtgtgatgtgatggtcagagagacctgggatttggttccagctctggttgttaattcttctgtattccttccgtgggggtggctagggtagagtgggtgagtatgctacttctctttctggggaggggtctgccaaacctaccttctccttatctgcctgggtgcattgaagacaagtgctttatgtattgaaacagaagaaaaaaagtggtatcaattgtaaaacaggcagctgtgaaaagtgtttcacagtttacaaagcactttcacatggttttctgaggtcctcaaaaaaagacagaaagcaagcaagcaaccagccatggaaagtagataaggttgttaggcttaagattatcacatttttaaagcagaggaaaccttaaaagagagaggtgaaaaggcttgagtcatagacatggggttctgcctgaatgtgctctttctgctgccccatgctgctttatactttgaagatcctgaatacattctttgctgaatgctaaagctgtgttagcttggggagggccctgtggatctttgtatgtgcggttgcttctttaatctttgggctggtgatagcttggcagagaggccttgctttcccttgccttggtaggagtttgtcctctgtggggccatacctttggcctgccttttcctcttccaaagtcctgctgagactttggaagcctaagacgtgtgaacgctttggatgattctgagagttcaagccaacctgccctgtggccttctcgtgactttgttaggactgaggcatcttctgcctgcctggataggactgaatacaaaagtagattttttttttcatcttttttttcagttagggaaacccagttgcttgggtggatccagacaaaatggattttcatccttggattttgtgcccacgcctctgggtcaccttgtgtcccttggcaacagctgctgctgttttggtcgtgggcagaaaactaaaggccacgtcttggggaggtggctggtttggccctgtgctggtgatatcaatgtgtctgctaagccccatagattgcagtgttgcttgtcaaattgtctgctttcaccacaactgccttttagtttggaaagtagagaaaggaaaatgtttaacttagtcattccccctgtgtgtggggggttggtcactgggtgcttaaaaacactctgcaagatctggactccggggtttaaggagccctcagtctaaggagattaagccaagtgtgttttggctaatatataatcatgagcagcaacagcaacatttggcaattagagctgtatactagggacttccagaccacaggcttgcttctctgtgacaccagctctgacttgtttcaattatcaggggagctggcgtgatacacacttatcgacataaagaaggtgaaagagattggtgccaaggaagtggtaagagcttcatttagatacaccaacaaaggggctgtcaggatactctgaggtctggcaggattggcagaatttacacaagttttataacagcctctcatgcctcacctgcttgagtacctgagtaaagctgcaggtatcttccttgccagtttataagaatggaatcaaagcatttgccactgaatgagagttggtgtgtgagcgttatatgaggaataaggagctcggcacacttaaaacttagttttctggtagacactggtagcttgtacttccaccagggaatccatgccttggcctcgttgttgggagctagaccaagcttaaagcattgcttgtttggaagggaatttgggctttcttgtgtcagagcacccagtccagtggaaaattggagaattgaagcaaacactaggtctgacacacagcatctactccctccctgtgaatctgatgtttttttttttggagacagagtcttgccttgttgcccaggctggagcgcagtggcatgatcttagctcactgcaacctctgcctcccggttcaagcgattcttgtgcctcagcctcccgagtagctgggattacaggcgcccgccaccacgcccagctaatttttgtatttttagtagagacggggtttcaccatgttggtcaggctggtgttgaactcctgaccttgtgatctgcccgccttggcctgccaaagtgctgggattacaggcgtgagccaccgcgcctcaccgaatctgatcttttactgtagcctcctcttattatctccttgacttttgccagggtactctcactttgagaaaggaaaaagatcctagtctttaacatgccttttccagatttctggggatagacctattactaaggctgtagaggcctcccttttctcttggctgcacttcagagcaccatgcccgtgtggcccattggaagcaagcccccttccagctgctagggaggtggtccattatctctttgctcttgttaagtttgattaggggagttccacgtagggcctgagaagaggaggtgcctgcaggacaataggtagctgatgagggatctgactcagctgcagctgaacctaggcgccacttgacgttccctgggaacatttagaaccttggaacatgctgcttgcacctgggagtggaatgtttgcagacagcccctctgttgttacagggctggattttgttgatttattgatatttattggaccctcccatgtctgagtcaattttttaggtaccagaggaggatgcagagacacgtttgagaagctcccagcctgtgagaagcttacacatcagtaagggaaacatgaatagggcattatttgagtatctaactgctatctctttctcattcccagctaccagcagaaatatgagatctagtatggatgatttttgatgggggcgggcgttgatgtgccttttaaatattgtagaattc

SEQ ID NO: 22729 - DNA, 2127 bp, Homo Sapiens
agcctgcctgcaagctgcgtcatcaactagcctgaatttagacaaagtgctttggggaaaagaaacgtgtggtgtgccttgtttttttccagtaattgttccatggctcgttctgcttgtaagattttccaaaataaggccgtagatgagaattatatcagcacattgggaaccgaaggcatgcggacactgttggcgctttgtaaaaaacacccctcaatcagacagacacacgtcatcgtcgcctgctggggctgggcccagatttcgagataggggagcggcacgtgcccgtgtggtacagatgggagccaggaagccctttgctcaggatggaggtctcctctattagggggcctgttacagtaactggtgggcctctggggtaccctgcaattgactttacatatttaactctttgccattgactttacatgtttaactctttaaagtcgacttccttccccctcaagagaacttaatttactcaaagtcctccctgggtagaggagtttggccgggtagtttcagcaagttactggtaccgcttctaggacagcgtctaacagcatctttgggaagatgactgtcaccaaagcagaaaaagctttctgacttgtgtaaccccctggagattttttaagtcccccaccccacccctttccctatttcttacaggagacagactgtgaccagtaccccctgctggattgagctgcacctgaatgggcctttgcagtggcttgacaaggtcctcacccagatgggctccccaagcatccgctgttccagtgtgtcttagagacatcaagtatggtaggggagggcaggcttggggaaaatggccatgcaggaggtggagaaaattggaactctactcaacccattgttgtcaaggaagaagaaatctttctccctcaactgaaggggtgcacccacctgttttctgaaacacacgagcaaacccagaggtggatgttatgaacagctgtgtctgccaaacacatttaccctttggccccactttgaagggcaagaaatggcgtctgctctggtggcttaagtgagcagaacaggtagtattacaccaccggccccctccccccagactctttttttgagtgacagctttctgggatgtcacagtccaaccagaaacacccctctgtctaggactgcagtgtggagttcaccttggaagggcgttctaggtaggaagagcccgcagggccatgcagacctcatgcccagctctctgacgcttgtgacagtgcctcttccagtgaacattcccagcccagccccgccccgccccgccccaccactccagcagaccttgccccttgtgagctggatagacttgggatggggagggagggagttttgtctgtctccctcccctctcagaacatactgattgggaggtgcgtgttcagcagaacctgcacacaggacagcgggaaaaatcgatgagcgccacctctttaaaaactcacttacgtttgtcctttttcactttgaaaagttggaaggatctgctgaggcccagtgcatatgcaatgtatagtgtctattatcacattaatctcaaagagattcgaatgacggtaagtgttctcatgaagcaggaggcccttgtcgtgggatggcatttggtctcaggcagcaccacactgggtgcgtctccagtcatctgtaagagcttgctccagattctgatgcatacggctatattggtttatgtagtcagttgcattcattaaatcaactttatcatatgctcttttaaatgtttggtttatatattttctttaaaaatcctgggctggcacattgactgggaaacctgagtgagacccagcaactgcttctctcccttctctctcctgaggtgaagcttttccaggttttgttgaagagatacctgccagcacttctgcaagctgaaatttacagaagcaaattcaccagaagggaaacatctcaggccaacataggcaaatgaaaagggctattaaaatatttttacacctttgaaaattgcaggcttggtacaaagaggtctgtcatcttccccctgggatataagatgatctagctcccggtagaggatcaccggtgacaact

SEQ ID NO: 22730 - DNA, 3138 bp, Homo Sapiens
gcactggccagacccagccagggatcctcgtattcgtcgagcctaatttccagcagccgggtaggcctcaccagaggctcctttccgtgaggccgcccccaattcctgcccctattctctgcctgggagatggcttccccgagccccccgccggagtcgaagagagacttgataaatcggcctgagaaaataagtaatgctccagactagctctctcatttgtgagttctccaggtgaagcaccatttttgaccttcccttgtgtcttctgttcctggctcagtgcctggaccccaaggaggagtgggattatctggacccagctcagagaagcctgtataaagatgtcatgatggagaattatggaaacctggtctcactggatgttttgaacagagataaggatgaggagccaactgtaaaacaagagattgaagaaattgaggaagaagtggaaccacagggtgtaatagttacaagaatcaaaagtgaaattgaccaggatcctatgggtagagaaacatttgaacttgttggtaggttagataaacaaagagggatcttcctatgggaaataccaagggaatctttgacccaggaacagagaatgttcagagaaaacactaacattatccgtaaaagaccaaactcagaagagaaatgccataaatgtgaagaatgtggaaagggttttgtccgcaaggcccatttcattcaacatcaaagggtccatactggtgagaaaccttttcagtgcaatgaatgtgggaaaagttttagtcgcagttcatttgttattgaacatcagagaattcacactggggaaaggccctatgagtgtaattactgtggaaaaacctttagtgtgagctcaacccttattagacatcagagaatccacactggagaaagaccctatcagtgtaatcagtgtaaacagagcttcagccagagaaggagccttgttaaacatcaaaggattcatacaggtgagaaaccccataaatgtagtgactgtgggaaagccttcagttggaaatcacaccttattgagcatcaaagaactcacactggtgagaaaccttatcactgtaccaaatgtaagaagagctttagtcgaaattcattgcttgttgagcatcaaagaattcacactggggaaagaccccataaatgtggtgaatgtgggaaagcctttcgattaagcacataccttatacaacaccaaaaaattcacactggcgagaagccttttctttgtattgagtgtggaaaaagtttcagtcggagctcattccttattgaacatcagaggatccatactggtgaaagaccttatcagtgcaaagagtgtgggaaaagtttcagtcagctttgcaaccttactcgtcatcagagaattcacacaggagacaagccccataaatgtgaggaatgtggaaaagcctttagtagaagctcaggtcttattcagcatcagagaattcacaccagggagaagacttatccatacaatgaaactaaggaaagttttgatccaaattgcagtcttgttatacagcaggaagtctaccctaaggagaaatcttataaatgtgatgaatgtgggaaaacttttagtgttagtgctcatcttgtacaacatcaaagaatccacactggtgaaaagccctatctatgtactgtctgtgggaagagcttcagccggagctcatttcttattgaacatcagagaatccacactggagagagaccctatctgtgcagacagtgtggaaaaagctttagtcagctttgtaatcttattcgacatcagggtgttcacacaggtaataaaccccataaatgtgatgaatgtggaaaggcctttagccggaactcgggtcttattcagcatcagagaatacacacaggagagaaaccttataagtgtgagaagtgcgacaaaagtttcagtcaacagcgcagtcttgtcaaccatcagatgatccatgcagaggtgaaaacccaagaaacccatgaatgtgatgcttgtggtgaagcctttaattgccgtatttctcttattcagcatcagaaattgcacacagcatggatgcaataaatgtagagcaatacataagctcaatttgatttgagactagtacccaagtgcagttttagtatggctcaacatggatcagatttagtgataaagcaaattctccttgggcctcaggcaaatagtttctaaagattctgtgaatagtggacaactgcccatgagcatttgacttcccttactctttgatgatcgtagagaaagacttggtaatttatctaagtatctttaataaatctttcagcagagagattaaacctaggttcagagcatgggtgctctgagggacaaagttggattagtataagggagctggagcagctgatagtggaaaacagaataatgattcaaagagtcttctgtcaccatgtcatattgtgggtctttcagttccatgatatgtttggctctgcatgccaaagtcccagtgattaagcatatataagttgtcaaggaaacaaagcccaaatgtttttaaaacaagtatacagtttttgtcattgtttaagaaagccatttgtttggcatgtgagttaaaggcagttccaatgcctgatggttccccagatctatgaaatgggtggaccattaaccttacatgtaaagattatgttagtaattaagaaaccctaacaaaggtgttaccaaggaacctttgggagtgccttttttgtttttcaagatggacccaaaaaaagtggaggaagatattgttcttttgtgccctcctacctgtgagagatatttgtagtcctatgtgaatgagcttatccctccacaaccaggtgcatatgaaagtgtacatattatgactgccaagtattggaaatgaaaagacctggagtctatgctaggaagctgagatattttggtattgcattggtttttatggtaactaggttttgcatgcaattaaaaatccttatttcttgttctagggcttcccttagttaatggttattataaacctattaattcatctgttttaaccattaaaacctgttttgtttttcgctttgaaaaaaaaaaaaaaaaaa

SEQ ID NO: 22731 - DNA, 11503 bp, Homo Sapiens
ggatccaagtctggaaactgggagaatgatggtgcagtggggaaaacaagaggaagacctgggttgaagtggaaactgatgaattttattttcagtaaaatacacatggcaaacactaattttctcaggttgcttccatcttacacacatgcacacatatatatacacaaacacctctcaacactggtctttctctcctcctgctacctcaccagtttccctccctcctccaacaaatttcattctctccttccctacatcccattcgctttctactctctgctccatttctgctgctgccactcaactgaagctcctttggcaaaggttacatggcactctctgtagacaaatccagtggaatattttcatattttcagtccttgttttcatggcccctttgtggcctttgggccatggttttcctccaaagctggcattttcctttattcttttcttttctttttatgagacagagtctcatcctgtctcctaggctggagtgcaatggcacaatcttggctcactgcaacctccgcctcctgggttctagtgattctcctgcctcagcctcctgaatagctgggattacaggtgcccaccaccatgtctggctaatttttgtatttttagtagagacagggttttaccatgttggtcaggctggtctcgaactcctgaccttaggtgatccacctgccttggcctcccaaagtgctgggattacaggcgttagccaccatgcccggctgcattttcctttactcttattacttattctctcctctttcttttcctagctccatctccttggttgctccctcttctgctcaccctggaatgttgataatcccagaacctgagaatggtctcttctcactggaaacagtctctgaaactagcatagagtttgattgtaccctagatacaatctgaaactacaatagatattctaaggatgttcagctcattatttctacatgaaacctctccccagaattcctgttttccccaccagcacctcctattctgttctgggcatccaaagctcagagagacatcacgatgtctctctgtaaacccgctgtttctggtcttctctactactattaaaggacagatgctggggagactcctccccctccctcacctcaatcccctcttccatctccattgcttaatccagatcctcatgaccccttgtctgacaactgctatagctccccactcctcatctctactccctccaactcaccgagctgttgttgacagacttatttttctaatatatatattaattttgttatttccctgtttggctttgacagatcaattttcccgcatgttgaagttcacatttcctcaggttgcttgtgcttccaatgacctatctacgtctatgtatttttgaactgctgcactccctcccccactccccaacctggtctcaaacctatgccccaactgtactggaactgacacactgatgtgtttcataaactcacgcccttattcatgatgcttattcagcccagagcaccatttccccaccccaccgtcacctccctaaacccctcctctagctctttgaaccacctaaaaatctacccaacctccaaaagtcaagtcaaaaatcacctctgctaggaaggaagtctttcctgagcccaccaggggctgttggcccctcttcctcttatattccctcccaccagttcctgggaccctggacatgtgtccaccaacagccatgacacttctttactctcatctgtttggtgtttgtcatcagtgagcctagcaccttgcctgggacagaggaagcattcaaggaatgctgaaggcaggtgaatcaaataccttgtatctaggaaagtcctaaagatgcccttttaaactagtggaggtgggaaaagactaaaacgccattttatattattatcaatataaaagcttctcagccaaatggaccttggctttctcctcaaactctgtggatgacagaaatgacattaaaatctgactcctaatgatatgaggtttgcatggtgaagaatttccaagatattttctgatctagaccctgagacgggggggataaaagtgaaagatgagatcagagttaattttttagaactctaccaaggatagccacaaaaataatcatgatccaaaaggaacatagcttaccatgcatgtggacctatatgtagatatgaatatgtgtgtgtgtgtgtgtgtgtgtgtgtgtgtgtgtgtgtgtgtgtttctatgtaggtcaagagtgatgtgaatttgggcaagttacctgaactctccaagggtgaggttccttatctgtcaaatgggggtagcaatgatgttcttgtgaggattaaatcaggcaaagtatataaaagcacttcacccattgcctggcatataattacattcaatgggggatgtagggaagagagagacagagagagagcatgcaagctagcacactggaggatgggctaccagattcattgttcactgtcttaaacacacgcaacctcccctctcttgcagtttgggttctggcatctttaacagtttcatgggcaaatcacttcaaacctccacaggtgctacttcacctgggcagcagttgctcaccccctaccccttccccctccccaatttaaccacacttgctgtgttctcaaggctgctgatacacaacaaactaagaaagtttttaatagttaccaatcacagttttcaaaatccactcatttttgcccttgtttttgggtttaaaaaatcctggcattttcctcagaattgctgaactattaggtgtgtagatgaacttgtgttttcttgctctcctactccaatttcttagactcagacatggaaaagcttctctgggtctcaagacataatttccagggtgcgtggttccgctgggtgtgctgtctggtcagtcttaccgttgtggattccacacccccaccccactgccccaacacctattaaagctgagctgacgtaacttcaggatacatttattatttcttaccttatcattcacaattagtgcaaatgattagttctctgccttgctctttaaaaagaaaagtcttcatggagtcattttatctacttgtgaaccacaatctcgtttttttttggatgctcctttgagactatacatatttaattcctttaatatttcatcatagagcagtccttcagaacctcttattttagttgttccttttactttggcaaaaatataagactaaagaagctgcaaatcttgttttcctgcctatttaaacagcatctagaaatctggagtaattgtctcctcttattttaaaggtttttttttaaaaaaaaaaaacagcatactaaatattgtggcatggagttgaaagctttaggtctgcagcatttgaaatgctcaaatcctgtctttaaagaacagtatttcctctttgtgactcagtgctgttatcaatatacaaggctgatagagtaatttcaaattcacaacattatatgtagatattcaaaggaaagaaaaagagcttcatgtgactttgcttaatgggtttacctatagttgtaaatgtatacagtaagtgatccatatttgggaattatcatgtaacaattatttctaataataattgatataatctattagaacttgtgagaggtttcgatgtaaataatttacctgcctagcagagagaagggaaggagagtaagcaggggaaaatgtttctaaaatgtcctatcattggaagtaaatgatcataaatgtttttgcgttaagttagggtttggttttaattttcccttgaattctaatgttcctacaccttccaaatatattttaaatcttcattaaataaatcacattttaatcacacacggagcttaaaagaggtgattctatgacagatattcagtattagctagtgaaggagaacattggttgaaggtacctaaaaccacgtgcataaggaacagtttatttcttatttggtgatttactatttcaagtcatttttgtgtcaaagctataaaaatctccagtgctaaaaagtgtaagaagaaatgagctagcaaaaaaaaaaaagtcgggggaaagttaatttttaaacttgcattacttttattttcctactttctgttatttcagaatgcatacttggaatgaatccttctagagacgtccacggtatgttaaatcccaagttatatttttaaataaagtacacacctccatagatgtgtatatgatttaatatctatgtatctctatgtataacttgtgatataatttaaccaaataattaaggctgtttctgctgattccaatatacttaaaagcagttctccatattgtaaatgttataccatataaaatatttcaatgaaagcttaaatgataccctcagttctacagcgtttaccataggtgcattctgatgctattaaatgcctctatacaactctctaaaaacaaaacagagcttggcttccctcacagcccagcttattacctgtgttatagcagtggtaatgcaagatttttatgagagtaaaatgtttactaagcattcctaaattttaaaaagattaattttaaaatgtcctcagcttgctacttgtgaggtacacaatgggtttatgaagtgaaagtgaaatcatcacacattaaccatagcatcccacagaaacattcagatggaggaaggatgtaatggaagaactaagggctctcctcccccctctcatagtaattagatttgaaaagtgaagtaatctcaaagccacttcagaagaaaaaaatgtttaattaaattccaatgttcaaaactggatagtgtgtatggcaggtgatttgtacatacatgttactcttcatcaaaattgttttccatccctgtgacatcaatacaaactgcagctatttggttccaaaccatagcaagatacattctattttttaaaatgtaaatggtcatttaaaatagaaataattcttttagacgtactgcatttttacaaatgtgattttggaaatatattgctcgcaaagggtaattttaagagaattgttgagattctaatcccatctttatgcatattttggggaggcttttgaaagagcaaaaaggtaaaagatttagttatcttctgagaccacctatagttctttacctaaagttgtagaagaaacaacgtcaatgcactgttactgttttccaatgaaattatttttcttccaactaaccaagcagtactttttaaatccactgcagaaatgtacatttcattcctgttgtgagccgttttcaattctcctccctccctctccccgcaacaaaatttggaaaaatctgtcacgtagcatccgcccaacgtatcgcttcgttggatttttttttttttttaatttggcattatgacaaaagtaaattctagcattactccagggaaacactgggaatgaacctggtaatgtttcctttcctttctcccttaggcaaaggaaggggaattctgtattgtcgctaaaatgagcgctcttggtggaaaggaattcctcacttcgtacacgctgtggctgtccttgaaagtgcaggctccgtaaaatgcccggccgactaaggggttccctttccccggagcccctgcctctttccattcattttagatcctcagtaaggaagggcagaggttggtctgtttcttcttttcaagagggcaccgcgctgcgcagttaacagcctgcgccgctccggggaaacccaaatgtcccgcgatcccatcgagtcaaggagcaaaagctgtgattgctatcagctttttgtcgggcttcaaactcggggtttatcggttgaaactcctagctgagcagctcccacgacgctgcctctgacggctaaactcggtgcatgcaaggctgggaccaactttccttactcgataaaggaacttgactccctcctgggagaccgcagcccgagtccgactcgcagcccccgtcgcggggtttagggttttaggcaagcggcccgagacccagaggagcctccctggacctttccgaggggcaaatcacccgagtctgctatttcccctggagtcaaaagcctacttttggagccgccacaccctcgtgctccctcccgcatctcgggggttccgggggatgcacgtgggggtggccccaggagccctgggtgggatctcggggaaatgcattggagaccaggcgaaaaggtttcccttgcccagaacttgcctctagagcgggccgcgtccgaacccgcaggcaaaggcgctgcgccccctgcgggcgggcgggcgcgcgcgatgcactcttctcagggacagagttagaaagtggacgtttgggcggggggagggggggatttacaactggaattaggcttaaaaaaatcattttaaaagaaaaatgtagtaagttttctttccgagaccccaggtccattaaaacaaaactgaactcgggtgctggcagtgcccagggggagcggaggcggagagggttgaggccgcgggccgcccgccttagccccccggaagcccgggctcctgaagcacagatagccaagagcggcccgagtcaagccccaggaacaggggcttcgggaagagaccccgaccgggccgcacagcggggaggcctggtccgagagtccccacctggccggctgcgactctatattggaacctcggaaacgcgccttggccgttccagctcaagtgggctctggggcggcttcctgtcttttatcctcgaacgctagttcttcccgggcgacccgaaggccacgaggcgggccgcacagccccgcgccgtcgggggcgttccgggagcaccggggactgcgcgcggcgtccagggagggcggctgctgccccctggcgtccgccagagcccgcggcgcgtcccgacagctccgcgcagtccgggcccgcccgggaaaggcctccacgccagtcaaccccggccccctcctgcgtccgggcccgcggcaacgcccggggacagtccctgcgcggcagcggccacagcaccctagccctgggggagggaggagcgggcgtcaggggccccgtgaggtcggcgagggacccccgcgccggggagcttaattgaggggctccgcggggaccacaaagcagcccgcggtggaacggggccgggatccggggactgggttgcagccccggggtggatgagaggccccgggaggtgcagggcccggcagggagggcgtggagggactcatggtgacgggagcagcctccgctgggagggagccccgccgggcggggtcggagttggcagcgcacgccggaccgggggcggggccctccgagctccgcgaaaatgcccgcagcaccgcggggaccggcgcagggggaagcggccgcccgcacgcgaagccggggtgggttccgcacctggggccgctcgagcgcacgggggcggggagaggagcgggggccgcttccggggagccggaggggagacgcggggcccgggcaggctgtccggctgctgcgggtgccggcgctacaaggcccgggagcaagccgcgtggctgctttcaactttccttccagccgcgcgttcttggggtctttcctgactaggaaactcctcgctggccgctgacgcacgcagcaagtgagacgcgcggagggatcgagccgcggcccgggcgcagcggtaaaaaacacccattacagaaaccgacccaagggaagacgctgagagcaaacggcacgcgcggacgccgtccggcctcatgcaaggaatcagcgccgcttcgccgcagctgacagccggacggtgcaggagcgcggagtggctcccccgggccccgcggccaaatcgcacccccgccctggaagcggaggcctggccctgggcggccgcgcaggatctggggccgtccgcgggctgcagccccggttcgggagcctcgtggcggccactgcgcctgcctgcagcggctcgcggggccgggcctctccgggtgcggcgcgccggccgggtcctcctcgggccggcggggcctgctttctttttccaggtctccggaccgtggccactcgcggagccgcacaagcctgcgtgtggctgcggaaaggggtccgcacgcgggcggggccccgggccagcatgcaggcttggatgcggggcgcgggggtggcctccgactccccgcccgggctgcgtacagtagcgcgcggcgcggcggcgggggcgcgcgggccaattccaggagccggcggcggcgagccgcgccctggctgataccggaaaggcctgtgattggccgccggccgcccctatgcaaacgagctgagggaatggaattcctccggccgggcttacagtaaaagcacgttcatttccaggcactctcattcatagagccagcgggcgcgggcgggacgggcgccccgcggccggacccagccagggcaccacgctgcccggccctgcgccgccaggcacttctttccggggctcctagggacgccagaaggaagtcaacctctgctgcttctccttggcctgcgttggaccttcctttttttgttgtttttttttgtttttcccctttcttccttttgaattaactggcttcttggctggatgttttcaacttctttcctggctgcgaacttttccccaattgttttccttttacaacagggggagaaagtgctctgtggtccgaggcgagccgtgaagttgcgtgtgcgtggcagtgtgcgtggcaggatgtgcgtgcgtgtgtaacccgagccgcccgatctgtttcgatctgcgccgcggagccctccctcaaggcccgctccacctgctgcggttacgcggcgctcgtgggtgttcgtgcctcggagcagctaaccggcgggtgctgggcgacggtggaggagtatcgtctcgctgctgcccgagtcagggctgagtcacccagctgatgtagacagtggctgccttccgaagagtgcgtgtttgcatgtgtgtgactctgcggctgctcaactcccaacaaaccagaggaccagccacaaacttaaccaacatccccaaacccgagttcacagatgtgggagagctgtagaaccctgagtgtcatcgactgggccttcttatgattgttgttttaagattagctgaagatctctgaaacgctgaattttctgcactgagcgttttgacagaattcattgagagaacagagaacatgacaagtacttctagctcagcactgctccaactactgaagctgattttcaaggctacttaaaaaaatctgcagcgtacattaatggatttctgttgtgtttaaattctccacagattgtattgtaaatattttatgaagtagagcatatgtatatatttatatatacgtgcacatacattagtagcactacctttggaagtctcagctcttgcttttcgggactgaagccagttttgcatgataaaagtggccttgttacgggagataattgtgttctgttgggactttagacaaaactcacctgcaaaaaactgacaggcattaactactggaacttccaaataatgtgtttgctgatcgttttactcttcgcataaatattttaggaagtgtatgagaattttgccttcaggaacttttctaacagccaaagacagaacttaacctctgcaagcaagattcgtggaagatagtctccactttttaatgcactaagcaatcggttgctaggagcccatcctgggtcagaggccgatccgcagaaccagaacgttttcccctcctggactgttagtaacttagtctccctcctcccctaaccacccccgcccccccccaccccccgcagtaataaaggcccctgaacgtgtatgttggtctcccgggagctgcttgctgaagatccgcgcccctgtcgccgtctggtaggagctgtttgcagggtcctaactcaatcggcttgttgtgatgcgtatccccgtagatgccagcacgagccgccgcttcacgccgccttccaccgcgctgagcccaggcaagatgagcgaggcgttgccgctgggcgccccggacgccggcgctgccctggccggcaagctgaggagcggcgaccgcagcatggtggaggtgctggccgaccacccgggcgagctggtgcgcaccgacagccccaacttcctctgctccgtgctgcctacgcactggcgctgcaacaagaccctgcccatcgctttcaaggtactggcccggagagggtggtgggaggacaggcggaggccgccgaggccgggggagatccgcgagggcagcggccaggcgggcggggccggattctggaaaggggcccccgcagccccgggtcggtcttcctagcttgggatgtgggggatgctgtgttgccgtggcgaccctcgggaggcactcgtctcagctttctggggcggcctcccaggagggctgaaaacatcagggtgtccccaaagatatccactgggagccggtcgggacctcccctggcaggggccttagctttgatacaaagtaggaaaaagtataaccccagcccggcagagacagcccgtctgctaacttactgctgcccctaccgctggattaacacccaaaccattttgtcttcctcagatgaaaggatcaggaaataaaatagtaagacttttctgccttcaagtcagtgaaaagaaactaactagggaaactgtcagggattttttttccccttctctaaccgccctataggaattagcatgtccaaagtccacagcgggcgtagttaagtttgcaaaagttttctgaagattctctgactttttaagcctgctcctgccaagaagccgcaagtatcggaatcctgtttcttttcccgggaaccgttctggaatgctatcatcagctcacctagattaagccaggggtagcgaaaggtgacgaggctgttttcggagagccaggggtcccagcggcccgctttcctgctagaggagggggcggcgcgtagccggagacttcagcgcggcggctccaaagatctcccttcacttttcacccctgatcatccccaaagctttgagctgcctttaaaaaccttgaccttcaacaggggtatgaaaacaaccccaggcgtttctaaacaatcaccctgctacactagcagcaagcagtaggaatttaatttctgcagtggagattctgttttgtctttggtgggtttgaaaagatgcgactaagtaaaatcagtgcgggtcatttcctgttcgtttaaagggcgaatcaaggcaggtggttccaagtgtaaagataagctactaaaaaaaaagtttaaataattgtcccctttaaagggagattaatttaatataagctttttatagttccaagcctcagctgggtcttgatccgttgacctgcaggtcgac

SEQ ID NO: 22732 - DNA, 14983 bp, Homo Sapiens
tcgcagaggtgcagccacaccccggcctaacgtgttgttccccccgatactggagtggtggggagggtgagtggactccaggaatcctcggaagggcgggggcggaggcagggggcccctctagccgctacttcgaaacagcattccttgttctcgatggtccccgcgcgactgtcttagctcacgacacttccggttccttttaaaggcccccaaggctgtgcaacgcggagcgtgagaggaaggtataaagggtagcgagagggcgggaccgaggaggaaagggaaaaaaaaaaaactagggggataggggtggggggacgcgcgaagggcgcgctctcgcgtcacgtgaccgggacgcgccgttcttccgtcggccattttaggtggtccgcggcggcgccattaaagcgaggaggaggcgagagcggccgccgctggtgcttattcttttttagtgcagcgggagagagcgggagtgtgcgccgcgcgagagtgggaggcgaagggggcaggccagggagaggcgcaggagcctttgcagccacgcgcgcgccttccctgtcttgtgtgcttcgcgaggtagagcgggcgcgcggcagcgcggggattactttgctgctagtttcggttcgcggcaggcgggtgtagtctcggcggcagcggcggagacactagcactatgtcggaggagcagttcggcggggacggggcggcggcagcggcaacggcggcggtaggcggctcggcgggcgagcaggagggagccatggtggcggcgacacagggggcagcggcggcggcgggaagcggagccgggaccgggggcggaaccgcgtctggaggcaccgaagggggcagcgccgagtcggagggggcgaagattgacgccagtaagaacgaggaggatgaagggtgagtaaggggcatcccaggatagtcaggcccaactagtccccctccccctctttattcccccgccattagcgctggttcccgctctcagcccgttctccgggccccatgcagcctccttgcactggtctccctttttctatgttgggttccccggaccttcatttccttcttcctttgcctgcttatcgcccccctcccccatcacacacgtttccacctttagccgtcaccatgctgctcctcggcccgccctcctttcctccctcgccatgggtctcctcccaccgacttagccgccagattttttcccgcctgtcgtggggtaccttttttctttccatgctgtcccctctttttccctttttctacagtcttgggcataaaaacacagacacaaacagcttctctgtttgtattactaaggtttatttggtgcttctccaccatcctgaaacgatgcgattgtttataagcacatgttttggggaacgcgtaggctgtccacctctgcctctcccttgtcggccttacgccgactgttttcttgggattttgaataagtttcgcctaaggatttactcattttctccaccatacgctatcgcacaatggcatactcatacaggccctacattttgacatgcagaccaaattgggtctggtgaaatgctccgagtttcttgttggtacattggttttgctccgcgggctctggttaagttcttagtcgatcgggcctgcacttgactggagctgttcctatctccggcctagcatctacccttcccccaccccactgagttattctaaccgcgcacccttttcgcgccctcagctattgggttccccaactgttagtacagattgtaccttactttttatgtgcaacctaattttttacaacccccagccccctttttttcccggtgcccaggatcctattttggtgtcttgatatctgtttcccgcccactaagggaggcctgtagtcctcttaagagaaacaaatcactgtattgtgctatgggatactttttttttctttttggtgcaaatttcttagtattaacttgcttcctccaattgaaataacagttgtatatactacctaaatctgcatttagtgtattaaaatgcagcatttgggattgggaacataatacgggagttagcaggagggactaaatcaggtttcttggttgagttttcttagctccgattactgaccgatgatcgtgggttcacgcttccattcctttttgtaatggggaggggtgtgtgtgtgtctgaatttttttttaactgtaaagagaaaggtgttggtggatataacaagatgtcgctttaatctagtattagaaaacacgatttcttttactgagaaagagcccaggatttggagggaaagttgggaggggagaagcactttggaatatagggtttattaagcccagcttaggcagattcttgtcaggctgtttgatgatagtgctggttttgggggagtggtggtgggaagggaagcaaacttttaaaaattaaacagaaccaactcgaattgtatatagcttatttgagaaaggaagatgttagatatttggaaacttaaaacctttaacattttggttttcgtttgctgaattctgttctttggacagaggcaccaaaatgattaattgtataacttcctgtttggggcaggctttctgttagccctgataattcaaatcgcaaagcagctgactttatagttacctactgttgaagtgtaaatgaattaaagtttttaaccctaacagtgtcaaaaactaaaactagaattttgattggttgctgtaccggttgttaattccctagccattcaaactcctccccacgacactctgaagcagcgacggcacagcgggaagaatggtaaatcttttaaattttatttctgtattataaaggtttcagtagtcataatatgtagaggctgtgtattggttagttgcccattgatccccaggaaattctagaccatagtacatacagtaggtttgtacctgggatatataccttttataggcatcatgtgtaatctttgggcaaaattgatgccgttacatggtatttggtctgtggtaatgcatgtagttgcagtttggcaatttaagctaaacaattagtaacgatatttttatatcgagcaagaaaaaatattaccgtaatcttcacatttgatttattttaagatgaaaaatatttttgttggaatttaagtttaatggctaaatatgaagactccttgatataaaatattgtgtttaaaatgtcatgcatgttatactgaaatattctggagatgtctgaagcagttctttaagcagcactgtgtattatggaaaaatgtttgtcttttacctagcatatttgtaaatagacctttaataaaatgtgtgtgtgtgtgtgtgtgtgtgtgtgtgtatatatatataccattaaaaggtgggctaatgtggctttccactacagctcttaccagattttttattttcagtgtgatttggctggaatattaataacagttggttgacatgtattcacaattgcatgacttctctttggaagctggtaggttgagtattgttctttttatccatcctttcccctcccctaaatgtcagtctttctgcttttaggattatatttgaattttcaggggtttatacaccaccactggagagtagaaggccactaacttgcaggcagttaacttatatctttacaagctacattctattttaagagcctatttagggtaacatttaaagatttgcttatcactgtattctcatccactgaaatcagtccagctttaccttggagaaaaagcagatgggaaacaggcaaggggaaaagcaaaaaagaggaaaaaaaaagactggggtcacagtttcgatgaatgttattccctgtatttggtgagtggtgggcactagcagctcaatttcactgctagctaatagtggcaaattaagattaaactataaactatttgacattactccattatgtattttgagtctcatgtaattgtttccagtgatttgaaatgaccataaacttaaatttgaaggtcagtgttttgactcttcgaagtaattacacttgacctgctacctaaaacgatgtaatattacaacttttttgaataatctcaggaaaaatggagaaatgtttatattcatagttaataaacattctagatagtaaccaactgtcatttactgaaaataaaattttacccaggtttattttatttttgagacggagtttagcttttgttgcccaggctggagtgcagtggtgtgatcttggctcagcgcaacctccacctcccaggttcaagcaattctcctgcctcagcctccaaagtagttgggattacaggcatattccaccatgcctggctaattttgtatttttagtagagacagggtttcttcatgttggtcaggctggtctcgaactcccgacctcaggtgatccgcctgcctcggcctccccaagtgctgtaatcacaggcgtgagccactgcgcccggcctagccaggttgattttaaaattacacttaaaaataatgttctcatttttaagggctctaatatttgacttttcttaactttccaattatgcagccctatcctgttccagacgttaaggctttctttttgaatgaaaaactttcagacttttttctctctctttttttttttttttggtgtctgcactccccaccgtatctgtcccttcctctttctcccattttgagggatattataagggcaacagttttatagtctcaatattgagggtaagactggttaatagatagagtatccaaattgaatttattaaacacagttctgtgtgcatttccttctgcaaatctgagaataaagtgattacagtttcatcctaaaatactttaaaaatcagttggttttagaaataggtttttttccttttgcatgtaagaatggacagctatttttaggaaggcatgcacctgttatcccagctactcaggaggctgaggcaggagaattgcttgaacccgggaggtggaggttgcagtgagcctagatcatgccattgcactccagcccgggcgacagagtgagactctgtttaaaaagaaaaaaataagtatttgtaaatgtatatatatatatatatacacacacacacacacatatatatataaaatcattatgccatcagtttgagggagagcatgtatgccaacattgtaaagactaagtgcccatttatccataattaagataagcagacttttccccattgtactataaagttagagtttggggctgggtatggtacttccgcctgtaatcccagcagtttgggaggctggagcgggcggatcacttgaggccaggagttcaagaccagcctggccaacgaggggaaaccccgtctctactaaaaatgcaaaaatcaagtcaggcgtggtggtgcagcctgtaatccctcccacggaggctgaggaatgagaatcactttgaacctgggaggcagaggttgcagtgagctgagattgtgccactgcgctccagcttgggcgacagagtgagactgtctcaaaaactaagcaaccagaaacagaaaaagatggaatggaattaatatgttccatttagtaaagatggaatagaattggtccagtttgtgttcattgtagcatattcacctatttggtctgcaaccatttttttttttttaaagcctaagcataccctgagaacaacaaccttttttgattagaacagaagaaaaagccagaatgttcttgggctgccaaaatattaatacgtttgtctcaaagacgaaccacttaggtgcttgcttagagacttctactttacacagaatttgaaaagtttgacagctggctacttactctgcaaaacggaagggagactttttagaacagcaactggtgatctggcaaaaatgaaaagtagaacttgtgaagaaatgagatggacttggtgtattaatagctaattttagaagaccctgtggatattctaaatcagcataatagtgatgtctgagccatagtgttaaattatgattactgtatttgaagtataagaaggcagaaaagtgtgatgctgttagaaaaaaatctcatttcaaatgattgaaggttaaaaacaattggggaaagattagagagggcaggcggtgctttaagggaggtggaataatacttggctccttattctccaaaagtgctggatagctgaagtttttaatattctggataattgatatttgattattagtttaggagggatagcatcttcagtgaacccttgtagctctaaggtaggcatattaaacaactaccatactaaaggtggggagtacgtttggagagcactttgctgggccagctgatgatatgcttaggtgatatttaagaaaatctgcttcttgtctgaaaaacatttggggcttcagaataataccacatacctcattcttggtgttttaatttatttctttgtaattgttttctgtttcttaataattttaaattaagggtattttcccaatataaacattgctttttggttaaataaaatcaaaactagttctgtctccatatctgaatagaccagacagagaattttcttgcctttcaacagcttaaaaaatgtttttgttagaactgttgtgttcaggctgaaatactttcaaagtttgttagttattattgagaaatttctgtaataatcatggaaagggtaatttaatagttaaatctcaacttaattgaagttatttctgttgtggaacttatggtcatcttagcaagaggtcattgctttatagtcagttctctttctcattaaaaatatagtgtactcacctttacagggtgaatgttggtaaataacttctgtctgtgaaggaagtattctggacctgtaagttaaaaataaggtgtttatagcaaattatgtaaataaagattgtatattagaaggtacacactattcaaatttaaagaaaatgtatattgagaaaataactcaaattcttccatgaaattggcaagaagtaaacatttcaaatacacaaaacattatgggtatttttgttcatttgattataaaatgccaaagttgttttataaatgctacttcaagcctggaaactttgaggaagtcctgaacattaagcatataaatggcccagctctagaatacatgtaagttgaaaagctaacctgaagtgggaagcgcagtatatacctaagacttactctgcactgaaagtttgctttgtcactagaagtaaaacaagactgtggtaggatagtaagatcagtaacacctcagttaatcaggtatcttggaggaagtgaagaaagaccctaattcaagggacagttaattggccttttattccaagaatgggccttagtggcagtatcttaaaagcccacaagatggagatgtttcctaatgaaaggcctttaatttctttatagagctgagttagtgtcacatcccagtccccacccatgacccttccccagttaaaaagaagagaaaatgttgagcaagtctgatttgattcccatggtgacatttttagccattatgtaacaaattctgacagtttacccttaaaattaaaaacctccagtcctgtctttttaaagggtagaaagaaggttaggtataggatagctttttatttatttatttatttatttttgtacaaagggagcctatgtaaagctgccagatctgaactttctggtgttttgctgtaatgttagtaagatttcgccttaaaatattttattttgagtatatacgtttggtcttagagtgtcttggtggatttccgcttaccacccatcactttctgcattttaaaggcttaaatactttattgctggttaactgaggttctactgtaaacgaatcatctaagttaattagtggattgtacttcaatggataattttcactaaattgtttatattgcacattacttttgtcttaaggactcttagcacatcaaaaaaattggctcacaacttaattgtgagatgtagaattttccattttatgtgctaagagttttgttaatgagagaactgttaaaatagaaaaggagcttcagcatagacaccaatgctggttgctgagatcagtggggaactgcatagcattttaacaagtttaatgaacatttggaagagaaatttgaagctaagattctggtttttttgctgttaactttttaattttttaatctaaggaaaacttttatgtacagtatttttactttgggtatatgtttatcttttagcaagttgaaagacttaatttgctgcttgctcactattttgtaattatttgggagcagcagtaataagccagctttttggaataggatgttcctgatgtgtggttatgtaggaagaatgatgttttaatatactgcccagtaaactggtgcagtttggaaaaggtgtgttattgatgtggataatatttaaggcaattttttttaagcattttaatactgctttttgtctttacaggaaaatgtttataggaggccttagctgggacactacaaagaaagatcctaaggaaaacttttatgtacagtatttttactttgggtatatgtttatcttttagcaagttgaaagacttaatttgctgcttgctcactattttgtaattatttgggagcagcagtaataagccagctttttggaataggatgttcctgatgtgtggttatgtaggaagaatgatgttttaatatactgcccagtaaactggtgcagtttggaaaaggtgtgttattgatgtggataatatttaaggcaattttttttaagcattttaatactgctttttgtctttacaggaaaatgtttataggaggccttagctgggacactacaaagaaagatctgaaggactacttttccaaatttggtgaagttgtagactgcactctgaagttagatcctatcacagggcgatcaaggggttttggctttgtgctatttaaagaatcggagagtgtagataaggtagtgtgttacgtgttctgatcagttaataatataaaatattaacatatggatagtttgatacaatgagtttgcctatttgtggttccccattttgatagtataggaaggaagaatagttcttgccccaatacgttttatgaagatagaggtaggttcaggaattatttcctgaataatttgtgttccaggctctgctaaattttgaaattaactttaaagatactatagacttaaagatgcctagttaaaaggatgtgttttagcaattcacagaagtccatattttgaaattttgttaggcaagcaacttttaactgaatcattattttgatcctgggctaaagggaagtagcagttatgtttgtatatagtgctaaagggaagtagcagtcatgtttgtatatattgaaggtaatggttatctagtaattggttaaatttgtgtatgtcctaccattcttacctttagatttaaacagtatatgttagttgatgttacatcaccaccatgacttgacagtttaatcttgagcaagtcaacatatgcttggcattatctgtatttatagttatttttaagtaagttaatagtctctgaacttcagttaagatatatattttttaaatgaaaacttcaatttccttaggtcatggatcaaaaagaacataaattgaatgggaaggtgattgatcctaaaagggccaaagccatgaaaacaaaagagccggttaaaaaaatttttgttggtggcctttctccagatacacctgaagagaaaataagggagtactttggtggttttggtgaggtatgttataaatgttttgacccagtttatgtcaaaattagtgtgaatgtgattgtcccattatggactcagagtcacttggcttttcaaagctgttagggtagattatgtgatctgttttggaataaggatattgtaaatacttcattagcaggtctttgaaggttggataatgtgtttttctcattgagcacctactctatgcagagtattgctggggtagagtataccaaagatgaaatagacaaacattcttaaatacagacaattaagaggaagaaatctagattagaaggagacttttgttgaaaataggaaaggaattaagaatagggtgtagtgccttatcagttgaaatgcatgtgtaagtgcaaatttaatgagactaatcattatagactcattagtgaggctggacgcgatggctcatgctgtagtaatcccagcacttgggaggccgaagtgggtggattactggagaccaggagatgaagaccatcctggacaacatagtggacccgtctcaattaaaagtaaaacaaacttagactcattagtgaaataggtagataatagaggtttcttttatgaattaatgaattaatgaaagttgagaaatttgtggccttgggctccagatacgtcccacagacatttattgcttgattgaaacaataagtgcttttttagtgttgaggatttgagatattgcccacaaaactcagtatctagctttttaaaaaatatttgcaagagcacgcaacatgggaactgacgctgccctcctgtacggcagcatctctcaaactgagtagtagcttccatcttggtttgggcatatgctctccagtttttagtagtcctcaccaccctacttcctgttttctctcaaatacattttttttctgtttttcttagatttgactgttttcttcttgttctttgtgggcatttgaatttgtgacccttgagttaggtagtaaatgtcagtgcgtggtaaagcttatttttgtaaatagttgtgaagaccttagatggaatgggtgttctaatttgaagaattccttaaaaggattagaataaatagggagaaacaggagactagaacttcagtgccaaatacatgttttctttgtgtgttttcccccctctaaacttgtgtttcttttaaggtcaataaaatgcatgttagcatattaaaatttgttttttaataccaggtggaatccatagagctccccatggacaacaagaccaataagaggcgtgggttctgctttattacctttaaggaagaagaaccagtgaagaagataatggaaaagaaataccacaatgttggtcttagtaaagtaagttaagcatccatttacttgtagagaaaactagctgttgtaaagagcttaaccatttatctttctctgtaaaggcttaagttctttgcatgctttaaaaacttctcattggttacttaccattgaccaactttttgtggggagcaggatggacacatttgttagtgtttttgtctaggctttcacaaaaatagtttttagaacttgacaagtaaaatgaagtaacatcactagcaagtactcataagtgattactcttaagtactaaatattggtttaattaataaactgactgaggaaagtttcaaattagcctactctatttaaacatgttggctattctggttattagaaacttatttagcaacttttattttcttgagtcagtttaataatgtaatttttctcttttagtgtgaaataaaagtagccatgtcgaaggaacaatatcagcaacagcaacagtggggatctagaggaggatttgcaggaagagctcgtggaagaggtggtggtaagctagagcctaagtttactctatcttaagcttttctgctttttaattatcctgaagtaaagatctttgctgatcttctgactttagtgaacctattaatgtgctgcaggccccagtcaaaactggaaccagggatatagtaactattggaatcaaggctatggcaactatggatataacagccaaggttacggtggttatggaggatatgactacactggttacaacaactactatggatatggtgattatagcagtaagtactatactttttatattaactgctatttgacatttattttgtacaaatttggataggcagaaaggttagtgtagccttgccaagtgcaaatgtcttcaggtttcaaattcctggaaacttgaaactgcagccattttattgcttggttcctcccagcctatatcacacacacattataagggtagggtgtatgtgtggttctatatatgtttgctgggcatttgttttacttggatttaaaaattttaagctcagttcagatcttttaagctcaaggtattctaaatgtcacttcttggaccaaccaataatcttggcatgatgtgtcttaatcctataaaactgaataataccacatgttgccagttaaaactaatagtatcctcgctttaggattattaatgtagaaactcttaaaacagatgttgagcttgatagaaccaaaaaacttgacttttagacatggaaagccctgacttcattgtgcaactaaggtagttgctctccacctgatttgtagcaactgttgagtcgtcaggtaaagggttctactagaagcaatcttacatttttttggaggagagtggttgcattggttgcattgttttaagtggtttttcttttccttccttggttagaccagttcttggagttatatcctttcttaggtgactaggcctgctgcacaataataggttaattaaagtcagaagaaggtcagcaaagatggattgggtgagattggggcccttttcttagaagggcagagatactaagcactgattgtggttgacaatttgttctaaattttaagatattttttgctggtggttgtgaaagggtcagctgtccatcctttgaaacttaaaacttttaaactgtaagggtgaggggattgtctcccattttatacaataagtcaagtaatcagctcattctgaatgcctgccattgtatgcattcactacatatttggtaaattatttgataaatgattgctcagggtgaatttttcacacttgggaattaagctacccttaattttttgagattgtttaaaattaggtactgttctgattattagtatgtaaccactaccgttctggttctaacacttgttttattttagaccagcagagtggttatgggaaggtatccaggcgaggtggtcatcaaaatagctacaaaccatactaaattattccatttgcaacttatccccaacaggtatgttctaaaaatagtttttttttgtcatttacaatagtagtttttataatctatattgttcataaaacaatgcttaatttaagagtttcacagcacccagaagtgcttaccatattataacatagtgactttcaaaagatatgtaacacaggtgctcttaagcttttgcctttttgtcctattattaacaagtcagtaaagttaacaggtaaagtactgctaatgggtacaaattaaggaattgcagcaaaaaagtattgcctactaactctgacattataccttgtttgtaccgccagcgggaacttcattgcaggccctgtgtcgcgctgacttcagattctcacaggcccgctcaatgcggacagggtaacgagatgctccacgctctcgaatgctgccgtttggtatggtctcttccaacatcctgtatcagcattataaaataaaatggatacttcaagctttgccttcacttatttctttgctttttaaaaactatttgtaatgtaattttaatgcattttttacaggcccagtaatggttaaatacgtcagcttactgaataattttaactatttattcttctaaggatacagcttgtctctggattttccagtcttaattttatattttattaatctattttaatgcttgcttttcccatttatagacgttgtagcagtaattgcaagaagttcttgagctgaattcctgttgtgacaacttcctataattacagtagataactttttcttttagtcgtatataacttttctataacttgtgatggacaagagatatgcttatccaataaaataagcttaaatattagatgctcttgggtcaaaatgtccttttaccaaattgacctttttatgagttctttgggtaaatactttaaagctttttatattttaaagaatacttgtaaaagcatatcacatcttaaaccagtggtgcacatgtggatttacagctcatggactctactgttcagctttaatttataaaacatatcacacatttaatgttatacagtatttacatatagtggaacatagggataactcagttttatgtaaatttttgttaagtgttgtagcctgcccagagtgacttctattttttcttctttgtctccaggtggtgaagcagtattttccaatttgaagattcatttgaaggtggctcctgccacctgctaatagcagttcaaactaaattttttgtatcaagtccctgaatggaagtatgacgttgggtccctctgaagtttaattctgagttctcattaaaagaaatttgctttcattgttttatttcttaattgctatgcttcagaatcaatttgtgttttatgccctttcccccagtattgtagagcaagtcttgtgttaaaagcccagtgtgacagtgtcatgatgtagtagtgtcttactggttttttaataaatccttttgtataaaaatgtattggctcttttatcatcagaataggaaaaaattgtcatggattcaagttattaaaagcataagtttggaagacaggcttgccgaaattgaggacatgattaaaattgcagtgaagtttgaaatgtttttagcaaaatctaatttttgccataatgtgtcctccctgtccaaattgggaatgacttaatgtcaatttgtttgttggttgttttaataatacttccttatgtagccattaagatttatatgaatattttccccaatg

SEQ ID NO: 22733 - DNA, 2840 bp, Homo Sapiens
cagcggccgctgaattctagggcgggttcgcgccccgaaggctgagagctggcgctgctcgtgccctgtgtgccagacggcggagctccgcggccggaccccgcggccccgctttgctgccgactggagtttgggggaagaaactctcctgcgccccagaagatttcttcctcggcgaagggacagcgaaagatgagggtggcaggaagagaaggcgctttctgtctgccggggtcgcagcgcgagagggcagtgccatgttcctctccatcctagtggcgctgtgcctgtggctgcacctggcgctgggcgtgcgcggcgcgccctgcgaggcggtgcgcatccctatgtgccggcacatgccctggaacatcacgcggatgcccaaccacctgcaccacagcacgcaggagaacgccatcctggccatcgagcagtacgaggagctggtggacgtgaactgcagcgccgtgctgcgcttcttcttctgtgccatgtacgcgcccatttgcaccctggagttcctgcacgaccctatcaagccgtgcaagtcggtgtgccaacgcgcgcgcgacgactgcgagcccctcatgaagatgtacaaccacagctggcccgaaagcctggcctgcgacgagctgcctgtctatgaccgtggcgtgtgcatttcgcctgaagccatcgtcacggacctcccggaggatgttaagtggatagacatcacaccagacatgatggtacaggaaaggcctcttgatgttgactgtaaacgcctaagccccgatcggtgcaagtgtaaaaaggtgaagccaactttggcaacgtatctcagcaaaaactacagctatgttattcatgccaaaataaaagctgtgcagaggagtggctgcaatgaggtcacaacggtggtggatgtaaaagagatcttcaagtcctcatcacccatccctcgaactcaagtcccgctcattacaaattcttcttgccagtgtccacacatcctgccccatcaagatgttctcatcatgtgttacgagtggcgttcaaggatgatgcttcttgaaaattgcttagttgaaaaatggagagatcagcttagtaaaagatccatacagtgggaagagaggctgcaggaacagcggagaacagttcaggacaagaagaaaacagccgggcgcaccagtcgtagtaatccccccaaaccaaagggaaagcctcctgctcccaaaccagccagtcccaagaagaacattaaaactaggagtgcccagaagagaacaaacccgaaaagagtgtgagctaactagtttccaaagcggagacttccgacttccttacaggatgaggctgggcattgcctgggacagcctatgtaaggccatgtgccccttgccctaacaactcactgcagtgctcttcatagacacatcttgcagcatttttcttaaggctatgcttcagtttttctttgtaagccatcacaagccatagtggtaggtttgccctttggtacagaaggtgagttaaagctggtggaaaaggcttattgcattgcattcagagtaacctgtgtgcatactctagaagagtagggaaaataatgcttgttacaattcgacctaatatgtgcattgtaaaataaatgccatatttcaaacaaaacacgtaatttttttacagtatgttttattaccttttgatatctgttgttgcaatgttagtgatgttttaaaatgtgatgaaaatataatgtttttaagaaggaacagtagtggaatgaatgttaaaagatctttatgtgtttatggtctgcagaaggatttttgtgatgaaaggggattttttgaaaaattagagaagtagcatatggaaaattataatgtgtttttttaccaatgacttcagtttctgtttttagctagaaacttaaaaacaaaaataataataaagaaaaataaataaaaaggagaggcagacaatgtctggattcctgttttttggttacctgatttccatgatcatgatgcttcttgtcaacaccctcttaagcagcaccagaaacagtgagtttgtctgtaccattaggagttaggtactaattagttggctaatgctcaagtattttatacccacaagagaggtatgtcactcatcttacttcccaggacatccaccctgagaataatttgacaagcttaaaaatggccttcatgtgagtgccaaattttgtttttcttcatttaaatattttctttgcctaaatacatgtgagaggagttaaatataaatgtacagagaggaaagttgagttccacctctgaaatgagaattacttgacagttgggatactttaatcagaaaaaaagaacttatttgcagcattttatcaacaaatttcataattgtggacaattggaggcatttattttaaaaaacaattttattggccttttgctaacacagtaagcatgtattttataaggcattcaataaatgcacaacgcccaaaggaaataaaatcctatctaatcctactctccactacacagaggtaatcactattagtattttggcatattattctccaggtgtttgcttatgcacttataaaatgatttgaacaaataaaactaggaacctgtatacatgtgtttcataacctgcctcctttgcttggccctttattgagataagttttcctgtcaagaaagcagaaaccatctcatttctaacagctgtgttatattccatagtatgcattactcaacaaactgttgtgctattggatacttaggtggtttcttcactgacaatactgaataaacatctcaccggaattc

SEQ ID NO: 22734 - DNA, 1115 bp, Homo Sapiens
ttgggacgccaaggagttttcggtggctcagctgggtaaccggggatcaccatggcggcctcattggtggggaagaagatcgtgtttgtaacggggaacgccaagaagctggaggaggtcgttcagattctaggagataagtttccatgcactttggtggcacagaaaattgacctgccggagtaccagggggagccggatgagatttccatacagaaatgtcaggaggcagttcgccaggtacaggggcccgtgctggttgaggacacttgtctgtgcttcaatgcccttggagggctccccggcccctacataaagtggtttctggagaagttaaagcctgaaggtctccaccagctcctggccgggttcgaggacaagtcagcctatgcgctctgcacgtttgcactcagcaccggggacccaagccagcccgtgcgcctgttcaggggccggacctcgggccggatcgtggcacccagaggctgccaggactttggctgggacccctgctttcagcctgatggatatgagcagacgtacgcagagatgcctaaggcggagaagaacgctgtctcccatcgcttccgggccctgctggagctgcaggagtactttggcagtttggcagcttgacttctgcagctggaggaggcccctcaggccggggatctggggagggctagcccaaaacctcccgcatcgggcaggcaccccctgaagtacttccttcagggtttcccctttgtgagggtgtcgagtagcctcaccggcctgtctggaggagcagctggctctgctctgagaaactctggcaagtggacgccattctcttgcccttaggattcactgctctctcctacagccgccaggcctggggtcctgaaaggaccttgggtggtaaagctgtacttggtgggagtgagggcgtggggaggaaccatgcaaatcgccttccatggtttttaaatgcagtaaataacatttctggatgagacttgtttccaaaataaaccagctatatctgttttgaaaaaaaaaaaaaaaaaaaaaaaaaaaaaaaaaaaaaaaaaaaaaaaaaaaaaaaaaaaaaaaaaaaaaaaaaaaaaaaaaaa

SEQ ID NO: 22735 - DNA, 2792 bp, Homo Sapiens
gggagaccttcctccctgtttgcagacgtccgtgggagacccttattttttccaccgctaaggttaagagattctggaatagaagcgtcgaaggagatcaagtgaaccttctacaactcctcggatgtcgccagtctccctttcggggcggaagactacgtttgagcatctcactgaggtgcaggaatggaagaacccaccttgcagcttttctgcagtgtggcttgctgatctacccctaggaatgaagaggaggcttgtaataatccgatgaagtacagatgttgaagaggatatcgcaggacctaaacttgtgatcgtttgggggaggtcacacacgtttctgagtgggaatggatgggcgtgaatgacgtgccctcttaaaaagcacaacaatcctttaagagagagcaaaattgagttttcccattttggccaagattttgaagacagttcaatgtattctacatttgacataagatgagaactttctaaagtattctctccaagagcgtaaacgatgactaccccagccctgctgcccctctctggacgtaggataccacctctgaacctggggccgccttccttcccacatcacagggctaccttgagactttctgagaagtttattcttctccttattcttagtgccttcatcactctgtgttttggggcattctttttccttccagactcttcaaaacacaaacgctttgatttgggtttagaagatgtgttaattccacatgtagatgccggtaaaggggctaaaaaccccggagtcttcctgatccatggacccgatgaacatagacacagggaagaggaagaacgtctgagaaataaaattcgagctgatcatgagaaggccttggaagaagcaaaagaaaaattaagaaagtcaagagaggaaattcgagcagaaattcagacagagaaaaataaggtagtccaagaaatgaagataaaagagaacaagccactgccaccagtccctattcccaaccttgtaggaatacgtggtggagacccagaagataatgacataagagagaaaagggaaaaaattaaagagatgatgaaacatgcttgggataactataggacatatgggtggggacataatgaactcagacctattgcaaggaaaggacactcccctaacatatttggaagttcacaaatgggtgctaccatagtagatgctttggataccctttatatcatgggacttcatgatgaattcctagatgggcaaagatggattgaagacaaccttgatttcagtgtgaattcagaggtgtctgtgtttgaagtcaacattcgatttattggaggcctacttgcagcatattacctatcaggagaggagatattcaagattaaagcagtgcaattggctgagaaactccttcctgcctttaacacacctactgggattccttgggcaatggtgaatttgaaaagtggagtagggcgaaactggggctgggcatctgcaggtagcagcattctggctgaatttggtacactacatatggagttcatccacctcagctacttgacaggggacctgacttactacaaaaaggttatgcacattcggaaactacttcagaaaatggatcgtccaaatggtctttatccaaattatttgaaccccagaacagggcgctggggtcagtatcatacatctgtcggtggcctgggagacagtttttatgaatacttactgaaagcatggttgatgtcagataaaacagaccatgaggcaagaaagatgtatgatgatgctattgaggctatagaaaaacatcttattaagaagtctcgtggaggtcttacctttattggagaatggaagaatgggcacttggaaaaaaagatggggcatttggcctgctttgctgggggaatgtttgcactaggagcagatggttccagagcagataaagctggtcattatttagagctaggggcagaaattgcacgtacttgtcatgagtcatatgacagaactgcattaaagctaggtcctgaatcattcaagtttgatggtgcagtggaggctgtggctgtccggcaggctgaaaagtattatatcctccgtccagaagtaattgaaacctattggtacctatggcgattcactcacgatccaagatacaggcagtggggctgggaagcagcactggccattgaaaagtattgccgagttaatggtgggttttctggagtcaaagatgtatattcctctactcctacacatgatgatgtacagcagagcttttttcttgctgaaacattaaaatatttgtatctgctgttctccggtgatgaccttttacctttagaccactgggtgtttaatacagaggctcaccctctgcctgtgttacatttagccaacaccacactttcaggtaatcctgctgttcgatgaaagcagttccagaaggaccattctcacctgtgttttgtttacatggaccactacagaaattagtttgaaggggcggcttttgaaaacctggacctctatgtcaacatgacagggtgaaactattccccctaagactgttcaacttgtagatacatcaactttgaaattattccattttatacctgaccaaaacatgttctgatatgtgtaggacagagacctggatgtgctttgatcgttaatgaggtggtcacatgagaagtgatacctgttactactgtattgtttttagagtcctgaagtctggaggctagacttcctgaaagcaagtcaagaatatagagca

SEQ ID NO: 22736 - DNA, 4049 bp, Homo Sapiens
  misc_feature (200)..(200): n is a, c, g, or t
  misc_feature (3723)..(3723): n is a, c, g, or t
  misc_feature (3741)..(3741): n is a, c, g, or t
  misc_feature (3778)..(3778): n is a, c, g, or t
aagccaagaaatggctacagccgtggaaccagaggaccaggatttttgggaagaagagggaattctgatggtgaaactggaagatgatttcacctgtcggccagagtctgtcttacagagggatgacccggtgctggaaacctcccaccagaacttccgacgcttccgctaccaggaggcagcaagccctagagaagctntcatcagactccgagaactttgtcaccagtggctgagaccagagaggcggacaaaggagcagatcctagagctgcttgtgctggaacaatttcttaccgtcctacctggagaactacagagctgggtgcggggccaacggccagaaagtggcgaggaggcagtgacgctggtggagggtttgcagaaacaacccaggagaccaaggcggtgactgtccatgttcacggccaggaagtcctgtcagaggagacggtgcatttaggagcggagcctgagtcacctaatgagctgcaggatcctgtgcaaagctcgacccccgagcagtctcctgaggaaaccacacagagcccagatctgggggcaccggcagagcagcgtccacaccaggaagaggagctccagaccctgcaggagagcgaggtcccagtgcccgaggacccagaccttcctgcagagaggagctctggagactcagagatggttgctcttcttactgctctgtcacagggactggtaacgttcaaggatgtggccgtatgcttttcccaggaccagtggagtgatctggacccaacacagaaagagttctatggagaatatgtcttggaagaagactgtggaattgttgtctctctgtcatttccaatccccagacctgatgagatctcccaggttagagaggaagagccttgggtcccagatatccaagagcctcaggagactcaagagccagaaatcctgagttttacctacacaggagataggagtaaagatgaggaagagtgtctggagcaggaagatctgagtttggaggatatacacaggcctgttttgggagaaccagaaattcaccagactccagattgggaaatagtctttgaggacaatccaggtagacttaatgaaagaagatttggtactaatatttctcaagtgaatagttttgtgaaccttcgggaaactacacccgtccaccccctgttagggaggcatcatgactgttctgtgtgtggaaagagcttcacttgtaactcccaccttgttagacacctgaggactcacacaggagagaaaccctataaatgtatggaatgtggaaaaagttacacacgaagctcacatcttgccaggcaccaaaaggttcacaagatgaacgcgccttacaaatatcccctaaaccggaagaatttggaagagacctcccctgtgacacaggctgagagaactccatcagtggagaaaccctatagatgtgatgattgcggaaagcacttccgctggacttcagaccttgtcagacatcagaggacacatactggagaaaaacccttcttttgtactatttgtggcaaaagcttcagccagaaatctgtgttaacaacacaccaaagaatccacctgggaggcaaaccctacttgtgtggagagtgtggtgaggacttcagtgaacacaggcggtacctggcgcaccggaagacgcacgctgctgaggaactctacctctgcagcgagtgcgggcgctgcttcacccacagcgcagcgttcgccaagcacttgagaggacacgcctcagtgaggccctgccgatgcaacgaatgtgggaagagcttcagtcgcagggaccacctcgtcaggcatcagagaacacacactggggagaaaccattcacgtgccctacctgtggaaaaagcttcagcagaggatatcacttaattaggcatcagaggacccactcagaaaagacctcctagcgaggtccccatgtgaggagatctgctttcagccctcacctaagggaggtgaggaagaggaaaagccctcttgtcagcctgggaagaccttttcgagggagtctccctgacctgctcagatctgacattacctcttcctgcaactaaacacgagcctgggcagaacctctcagccttcctctacgccttgaggggatgtttcatccaaagtacaacctgaattgaggcttctccttcactggagtgcacctgcctctacctcatgggtataaagtaggagaactaagagacttaagaggtcgtggttcctatatcgtccaaaaaataggctgttacatatcctaaagactgctcaacagcttcaagttgaaagtggccaaggacagccccttaggtttgggaagggacgagcctgaaggattctgtctttactggggtcaaatcttaaagcacacagttctggactcaagacaggaggtttgcgtcctgatggctttgccacacattcacaggataactgcatagatccctcgctgtctgattcacttcttaccatgcactttcctttgatgctgaggagaaatggaagtgggcgaaaaatctcaaggctgcttcatgtggaccttgtcaagctgctccctcccccagcatcaaattgttatcaggtgccaaacactgctagaaaggagggcctagtcagaagcctctttccatacgagttttggttttgtttttaatatttttttctattaaaatactcatgcatttaaccttcccgttattcaaccagtctcttggttgcatccctagcacttctactacaagtgagatggtagtgtttgagtgcttattgagtaaagcataattcggtcataatgaaatcgttcacattccctcatatgcacaagcccaccaaccccttcacaccccccttcacaggggtcgtatgagtaaggggatttggaaactgtcaacttacaaaggcactataacaattacagaatcatgattgccatgggccactttatttacatgaagacaactggagaacgactaagaccaaattatggaaaataagaaaaagctgttgctggcaagaccatcaagactgttctgacaccctgtccccatcatccctgactgagtactctgacatcacggaaagtgttgaacctgggaccctgaggaattcaccaggagtaaatggctttcatgtatttgtgttgtttgctttttcttacgtgattttatgttcatagagctagaaagtagcatctcatgatggcccaacaatctctgttgccagttaaaggttccttggagatgaggctgaataattatgaacctcaccttctctgattgtgggagtggcaagaactggggagacgtcctccataagtggagcacagggtatggggttaaagcatgacagggagagtcttctgtgcctggtttcttctcctctatctcataatgcattatgggcccgaggaataggggagggttaataagactccaaccctaatggcccaacagggaaattctcattttggtcgatgatattctgatggactggtttggtcttaataccagtcaaccgttgtccttctggaaatatacatatatgaaataaataaaggtaacacttgcagccaagttccctggtttctgggacttcccatcttacccattccttttccagggcttccagtgtcctgatacttctggagggtggttcatactccaaattagattctggggagttacagnagtaattttttccttggnagggaaagggaagggttgggggatggatttaggcagnagttccggtggaaacattatttgcactctgagataagatccaagcctggagtttgcagaagatactgtcctaataagcaggcatttctaaaccaagtatctaagcctaagcacagcttgtcctgggtgaaatgtctgccacaaaagatagtttctcctagctcagacttaaccatttataaaggttggtaaaatactggcagtgacaacaaattgactttttaattttcttatttgcattattccaataaatgaaaatctgtcagagttcg

SEQ ID NO: 22737 - DNA, 3141 bp, Homo Sapiens
gcgccgacttggagagccagccccatcgggttccccgccgccggaagcggaaatagcaccgggcgccgccacagtagctgtaactgccaccgcgatgccgaaggcgcccaagcagcagccgccggagcccgagtggatcggggacggagagagcacgagcccatcagacaaagtggtgaagaaagggaagaaggacaagaagatcaaaaaaacgttctttgaagagctggcagtagaagataaacaggctggggaagaagagaaagtgctcaaggagaaggagcagcagcagcagcaacagcaacagcagcaaaaaaaaaagcgagatacccgaaaaggcaggcggaagaaggatgtggatgatgatggagaagagaaagagctcatggagcgtcttaagaagctctcagtgccaaccagtgatgaggaggatgaagtacccgccccaaaaccccgcggagggaagaaaaccaagggtggtaatgtttttgcagccctgattcaggatcagagtgaggaagaggaggaggaagaaaaacatcctcctaagcctgccaagccggagaagaatcggatcaataaggccgtatctgaggaacagcagcctgcactcaagggcaaaaagggaaaggaagagaagtcaaaagggaaggctaagcctcaaaataaattcgctgctctggacaatgaagaggaggataaagaagaagaaattataaaggaaaaggagcctcccaaacaagggaaggagaaggccaagaaggcagagcagatggagtatgagcgccaagtggcttcattaaaagcagccaatgcagctgaaaatgacttctccgtgtcccaggcggagatgtcctcccgccaagccatgttagaaaatgcatctgacatcaagctggagaagttcagcatctccgctcatggcaaggagctgttcgtcaatgcagacctgtacattgtagccggccgccgctacgggctggtaggacccaatggcaagggcaagaccacactcctcaagcacattgccaaccgagccctgagcatccctcccaacattgatgtgttgctgtgtgagcaggaggtggtagcagatgagacaccagcagtccaggctgttcttcgagctgacaccaagcgattgaagctgctggaagaggagcggcggcttcagggacagctggaacaaggggatgacacagctgctgagaggctagagaaggtgtatgaggaattgcgggccactggggcggcagctgcagaggccaaagcacggcggatcctggctggcctgggctttgaccctgaaatgcagaatcgacccacacagaagttctcagggggctggcgcatgcgtgtctccctggccagggcactgttcatggagcccacactgctgatgctggatgagcccaccaaccacctggacctcaacgctgtcatctggcttaataactacctccagggctggcggaagaccttgctgatcgtctcccatgaccagggcttcttggatgatgtctgcactgatatcatccacctcgatgcccagcggctccactactataggggcaattacatgaccttcaaaaagatgtaccagcagaagcagaaagaactgctgaaacagtatgagaagcaagagaaaaagctgaaggagctgaaggcaggcgggaagtccaccaagcaggcggaaaaacaaacgaaggaagccctgactcggaagcagcagaaatgccgacggaaaaaccaagatgaggaatcccaggaggcccctgagctcctgaagcgccctaaggagtacactgtgcgcttcacttttccagaccccccaccactcagccctccagtgctgggtctgcatggtgtgacattcggctaccagggacagaaaccactctttaagaacttggattttggcatcgacatggattcaaggatttgcattgtgggccctaatggtgtggggaagagtacgctactcctgctgctgactggcaagctgacaccgacccatggggaaatgagaaagaaccaccggctgaaaattggcttcttcaaccagcagtatgcagagcagctgcgcatggaggagacgcccactgagtacctgcagcggggcttcaacctgccctaccaggatgcccgcaagtgcctgggccgcttcggcctggagagtcacgcccacaccatccagatctgcaaactctctggtggtcagaaggcgcgagttgtgtttgctgagctggcctgtcgggaacctgatgtcctcatcttggacgagccaaccaataacctggacatagagtctattgatgctctaggggaggccatcaatgaatacaagggtgctgtgatcgttgtcagccatgatgcccgactcatcacagaaaccaattgccagctgtgggtggtggaggagcagagtgttagccaaatcgatggtgactttgaagactacaagcgggaggtgttggaggccctgggtgaagtcatggtcagccggccccgagagtgaagctttccttcccagaagtctcccgagagacatatttgtgtggcctagaagtcctctgtggtctcccctcctctgaagactgcctctggcctgcagctgacctggcaaccattcaggcacatgaaggtggagtgtgaccttgatgtgaccgggatcccactctgattgcatccatttctctgaaagacttgtttgttctgcttctcttcatataactgagctggccttatccttggcatccccctaaacaaacaagaggtgaccaccttattgtgaggttccatccagccaagtttatgtggcctattgtctcaggactctcatcactcagaagcctgcctctgatttaccctacagcttcaggcccagctgccccccagtctttgggtggtgctgttcttttctggtggatttaatgctgactcactggtacaaacagctgttgaagctcagagctggaggtgagcttctgaggcctttgccattatccagcccaagatttggtgcctgcagcctcttgtctggttgaggacttggggcaggaaaggaatgctgctgaacttgaatttccctttacaaggggaagaaataaaggaaaggagttgctgccgaaaaaaaaaaaa

SEQ ID NO: 22738 - DNA, 1962 bp, Homo Sapiens
ctttcaccgacctgcccgagcaggtgcccgagtccatctcgaaccagaagcgtggcgtgaaggtgctgaagcaggagctgggcgggctggggatcagcatcaaggggggcaaggagaacaagatgcccatcctcatcagcaagatcttcaaggggctggcggcggaccagacccaagccctgtacgtgggcgacgccatcctgtccgtgaacggagccgacctgcgggacgccacccacgacgaggcggtgcaggcgttgaagcgcgcgggcaaggaagtgctgctggaagtgaagtacatgcgagaagccacgccctatgtgaagaaaggatccccagtatccgagattgggtgggaaacacctccgcctgaatcccctcggttagggggcagcacctcagaccccccgtcatcgcagtccttctccttccacagagaccggaaaagcatccccctcaaaatgtgctacgtcactcggagtatggccttggccgaccctgagaacaggcagcttgaaatccactctccagatgctaagcacacggtgatcctaaggagcaaggactcagccacggcccaggcatggttcagtgccatccattccaacgttaatgacctgctgacccgagtgattgctgaggtcagagagcagctggggaaaacaggcattgctgggagccgagagattaggcatcttggctggcttgcagaaaaggtgccaggggagagcaagaaacagtggaaaccagccctggttgtgctgactgagaaagaccttttaatctatgacagcatgccacggaggaaggaagcctggttcagcccagttcacacataccctcttcttgccaccagtcctcatccgtgaacattatcttcagattctgagacattcccgcaacagaaaccaaagaaagattagaccacagtcactggattccagttactaagaagcaaagttggacccaagcatcttgaaatgattctcagaaacaaaagttgaaataaggtagtttctgcaactctcaggcaacatgaaaataaaatttaccctcgtacatagccttgttctcacagtttctgggcattatgaacaatggggactgctttttcattcattcattcattcatcagtcaacatttataaatcatctactatgtgccaggagttataattgggacaagggataaagaggtgaaaaaaattcaaacttgtgaacctagcattatctggaacaaagtgtgttgatgtgcaggaacacataaggaaccatttgcagtaaagacaacaaaaaatgccaaactctgcctggacagtggtggaggactccttgcagtagaagtcatgttgaattgaagcctgagggaaaactcaccagaggaacaagggaagggagcccagagaggggcacgagcattccagacttagggaagatccaagcacagagctcgtgcactgctgcatggcccagttagagcaccacatacggccctggggaatgaggggaaatgaatcagatactcactaagtacccagcacttgacacaagttaccacttacaacgtgtgtatccattctgcaaggccggtattagtgtgcccattttgcagattaggtacctgaggctcaaaagagttcaggaatcaccccaggtggtgtagcttctgagagatggaggtgggattccagttccgggactgtgtgtcacttgcatacctgtgccttggtaccacagggggttgacacagaggtgggagatggggaggaagacttttcactagcgtatccttttctaccttttgaaattggaaccatggggaacagcaggagtctttggggatgataagagtcatggatgtgatctgggtagatatttttatatttggtgtcaaataacaaatgtccaaggagtgactgctgaatccaattttgcagtgatcctgattccattgtaaagaaa

SEQ ID NO: 22739 - DNA, 1661 bp, Homo Sapiens
ctgcgggcaggccagcctctccggccctggactagggggcgccgccgagagaagccgccgcaggctgcagagtcgccgaccgcgctgttcgcaggcagaccccgggctgcccaccgcggcctagcgcgcgccggatggcaggagaagtgtccgcggccacgggccgcttttcgctggagcggttgggcctcccgggcctggccctcgccgcggccctgctgctcctggccctctgcttgcttgtccggcgcaccaggagacccggtgagcctccattgataaaaggttggcttccttatcttggagtggtcctgaacttacgaaaagaccccttaaggttcatgaaaacacttcaaaagcaacatggtgacactttcacagttcttcttggtggaaagtacataacatttatcctggaccccttccagtaccagctagtgataaaaaatcataaacaattaagctttcgagtattttctaataaattattagagaaagcatttagcatcagtcagttgcaaaaaaatcatgacatgaatgatgagcttcacctctgctatcaatttttgcaaggcaaatctttggacatactcttggaaagcatgatgcagaatctaaaacaagtttttgaaccccagctgttaaaaaccacaagttgggacacggcagaactgtatccattctgcagctcaataatatttgagatcacatttacaactatatatggaaaagttattgtttgtgacaacaacaaatttattagtgagctaagagatgattttttaaaatttgatgacaagtttgcatatttagtatccaacatacccattgagcttctaggaaatgtcaagtctattagagagaaaattataaaatgcttctcatcagaaaagttagccaagatgcaaggatggtcagaagtttttcaaagcaggcaagatgtcctggagaaatattatgtgcacgaggaccttgaaataggagcacatcatttaggctttctctgggcctctgtggcaaacactattccaactatgttctgggcaatgtattatcttctgcggcacccagaagctatggcagcagtgcgtgacgaaattgaccatttgctgcagtcaacaggtcaaaagaaagggtctggatttcccatccacctcaccagagaacaattggacagcctaatctgcctagaaagcagcatttttgaagctttacgactgtcctcatattcaaccaccattcgttttgttgaggaggatttgactctcagttcagagaccggggactactgtgtgcgaaagggagacttggtagccatctttcctccagtcctacatggtgaccctgaaatctttgaagctccagaggagtttagatatgatcgttttatagaagatggtaagaagaaaaccacctttttcaaaagagggaaaaagctgaagtgttacctaatgccgtttggaactggaaccagcaaatgtccaggccgattttttgcacttatggaaataaaacaattgttggttatacttttaacttattttgatttagaaataattgatgataagcccataggactaaactacagccgcttgttgtttggtattcagtatccagattctgatgttttatttagatacaaagtgaaatcttagagaagc

SEQ ID NO: 22740 - DNA, 3634 bp, Homo Sapiens
ggcagctcctgcccggcctcgcccccacccgcgagcgccgaacctcctggggccggatgccatgggtaacaacttctccagtatcccctcgctgccccgaggaaacccgagccgcgcgccgcggggtcacccccagaacctcaaagactctatcgggggccccttccccgtcacttctcaccgatgccaccacaagcagaagcactgtccggcagtgctgcccagcggggggctcccagccacgccgctgctcttccacccgcacaccaagggctcccagatcctcatggacctcagccacaaggctgtcaagaggcaggccagcttctgcaacgccatcaccttcagcaaccgcccggtcctcatctacgagcaagtcaggctgaagatcaccaagaagcagtgctgctggagcggggccctgcggctgggcttcaccagcaaggacccgtcccgcatccaccctgactcgctgcccaagtacgcctgccccgacctggtgtcccagagtggcttctgggccaaggcgctgcctgaggagtttgccaatgagggcaacatcatcgcattctgggtggacaagaagggccgtgtcttccaccgcatcaacgactcggctgttatgctgttcttcagcggggtccgcacggccgacccgctctgggccctggtggacgtctacggcctcacgcggggcgtccagctgcttgatagcgagctggtgctcccggactgtctgcggccgcgctccttcaccgccctgcggcggccgtcgctgcggcgcgaggcggacgacgcgcgcctctcggtgagcctatgcgacctcaacgtgccgggcgcggacggcgacgaggccgcgccggccgccggctgccccatcccgcagaactcactcaactcgcagcacagccgcgcgctgccggcgcagctcgacggcgacctgcgtttccacgccctgcgcgccggcgcgcacgtccgcatcctcgacgagcagacggtggcgcgcgtggagcacgggcgcgacgagcgcgcgctcgtcttcaccagccggcccgtgcgcgtggccgagaccatcttcgtcaaggtcacgcgctcgggtggcgcgcggcccggcgcgctgtcgttcggcgtcaccacgtgcgaccccggcacgctgcggccggccgacctgcccttcagccctgaggccctggtggaccgcaaggaattctgggccgtgtgccgcgtgcccgggcccctgcacagcggcgacatcctgggcctggtggtcaacgccgacggcgagctgcacctcagccacaatggcgcggccgccggcatgcagctgtgcgtggacgcctcgcagccgctttggatgctcttcggcctgcacgggaccatcacgcagatccgcatcctcggctccactatcctggccgagcggggtatcccatcactcccctgctcccctgcctccacgccaacctcgcccagtgccctgggcagccgcctgtctgaccccttgctcagcacgtgcagctctggccctctgggtagctctgctggtgggacagcccccaattcgccagtgagcctgcccgagtcgccagtgaccccaggtctgggccagtggagcgatgagtgcaccatttgctatgaacacgcggtggacacggtcatctacacatgtggccacatgtgcctctgctacgcctgtggcctgcgcctcaagaaggctctgcacgcctgctgccccatctgccgccgccccatcaaggacatcatcaagacctaccgcagctcctagcccgttgcggtggcccatcccgcatacccatcttctcgggcttcagcccagtcccagctgaggaacaagccagtggggccccttctcttcctcattttggaaacttttcctcctctattaaacatgggaaactgaagcccttgaaggtttggggagaggggggtatcaggcagggagggggcagaggcaaatcaccgggcagagggaggggaggagaggaggccgcactctccctgtctctcccgtctctgcacccagctcctctctgcatgctgagggctaaattgggatctcagcctgccctaatctttccccatctgaggcaggtttctaggaggtgtctgtagtccatgtggcacctttgtgagaattagaaaacatgtaccttcctctgggcagctgcagccctgagccaggacatgtggcctggctagtgcagcatggagtggattttaggctcatttgccctctcagccaactgcccttgagcagtgtacagcctgctcaacaaccgccctgggcaggccgctcctgagctgctgtctccctctctgacctatgcctaccttctctttcttcgttccctgcccactgggcatggcagctgggggtgagaggctggtggttgcctcccgtcctgggcaggctgcagcctcatgccatgtctctctcccactacctgatgggcacatggacaggctgcagagggctccaggttctgggcccctggctgagaaggggaggatcctgtcctggctgtagccttcctgccccaatcatctcgctggatgccattgcccaggggtagcccttcggtatggctggggagaagggttggtcttctgccagggtccctaagaacaggtttgcagctaccctctctgaccttttccccatatcttgtgctgtccagggcctaggctgatagtcagagcctgtggcacacctgggatgggccagggccctgggtggggaggtgtgggttccctgggccaagaccagcctttttcctcagtttaattaatttatttatttggtttgtggttttgggttttttttgtgtgtgtgtgtgtaggtgagttcccatcctctgggccccttagaaatgctgcctttgtgtgtggggtacctgggaaagggtgtggctgaggcagtcataatgcagtatcttcccctgactccagccacaaagctcatacccagccctaccaatcatgaattggaactccataaggaggggccaaattgggagaccttttggcaaacagtgtctattttacagagaggcaaaccaagcctccttagtgccctggggctgatggtcacccagagccatagagcaccctctcctgggccagagctgggttatcatggttggcttaggtacctcaggtggcccaggaggtcccccctccataagggcgtcaagcttccaggagggccagtgttcctagtgtgggcccagcgcacagacagggagaccctgtgatggcggggcagggagcccgttcgtagggaagatgaggaggcaagggctgcctctcacacctccaggttttttaagttctggggagggagcgccccacctgctgaggtcggtccttttagccctgcctgccctggcctgggctttcccagcctcccagccctttgcccccttagaagggtttttgtttttgtttttttttgcatccatcagagaatgcacctttgtgtggcaggcagggcatgggttttagtcctggccaatgaccagctgtgtggccctggccgagttgtagccccctggagcccaggttccatttttataaaatggttgttttgggagagaaaaaaaaaaaaaaaaaa

SEQ ID NO: 22741 - DNA, 3500 bp, Homo Sapiens
ggaagaggaggcttcatggctgaggaggtcgcagcgccatgaagtccctgtctctgctcctcgctgtggctttgggcctggcgaccgccgtctcagcaggacccgcggtgatcgagtgttggttcgtggaggatgcgagcggaaagggcctggccaagagacccggtgcactgctgttgcgccagggaccgggggaaccgccgccccggccggacctcgaccctgagctctatctcagtgtacacgaccccgcgggcgccctccaggctgccttcaggcggtatccccggggcgcccccgcaccacactgcgagatgagccgcttcgtgcctctccccgcctctgcgaaatgggccagcggcctgacccccgcgcagaactgcccgcgggccctggatggggcttggctgatggtcagcatatccagcccagtcctcagcctctccagcctcttgcgaccacagccagagcctcagcaggagcctgttctcatcaccatggcaacagtggtactgactgtcctcacccacacccctgcccctcgagtgagactgggacaagatgctctgctggacttgagctttgcctacatgccccccacctccgaggccgcctcatctctggctccgggtccccctccctttgggctagagtggcgacgccagcacctgggtaagggacatctgctcctggctgcaactcctgggctgaatggccagatgccagcagcccaagaaggggccgtggcatttgctgcttgggatgatgatgagccatggggcccatggaccggaaatgggaccttctggctgcctagagttcaaccctttcaggagggcacctatctggccaccatacacctgccatacctgcaaggacaggtcaccctggagcttgctgtgtacaaaccccccaaagtgtccctgatgccagcaacccttgcacgggccgccccaggggaggcacccccggaattgctctgccttgtgtcccacttctacccttctgggggcctggaggtggagtgggaactccggggtggcccagggggccgctctcagaaggccgaggggcagaggtggctctcggccctgcgccaccattccgatggctctgtcagcctctctgggcacttgcagccgcccccagtcaccactgagcagcatggggcacgctatgcctgtcgaattcaccatcccagcctgcctgcctcggggcgcagcgctgaggtcaccctggaggtagcaggtctttcagggccctcccttgaggacagcgtaggccttttcctgtctgcctttcttctgcttgggctcttcaaggcactgggctgggctgctgtctacctgtccacctgcaaggattcaaagaagaaagcagagtgagggcactcactgccatcctgtggaagccaccatcatctctggcccaagcttctgtagtagctccctaaaataataccctatcatctgctcctaatccctccaatctctctccactgagtgctggaatgccttttttttttttctttcacttatataagggataattttttcctttttttttttttttgagacggagctcacctcttccgcccaggctgcagtgcagtggcatgatcttggcttactgcaacctccgcctcctgggttcaagcaattctgtggcttcagcctccggagtagctgggattacaggcacatgccaccacacccagtgaatttttgtatttttagtagagacggggtttcaccatgttggccaggctggtcttgaattcctgacctcaggtgatctgcccacctcagcctcccaaagtgctgggattacaggcgtgacgaccacaccaggcccgagaaatgcttttttaaaaaacacacatcttatggcattcaccttcttggagctctaggaacgtggttctcaatttttctctcaggactcttaaaaatcatcaaggtaccccaaaaagcttttgggtatgtgggttatagctatcaatatttatggtactagaacttaaaagtgagaaaaatttaaaacacgagaatacataggcacacattctattcatcgtgggaaccatggtgtcaatacatatcatgtagcttctgaaaaactccactgtacacttatagaatgaagaaggcaaaaaactttttttttttttttttgagactgagtctcgctctgtcgcccaggctggagtgcagtggcgcgatctcggctcactgcaagctccgcctctcgggttcacgccattctcctgcctcagcctcccaagtagctcggactacagggcgtcctccaccatgcctggctaatattttgtattttttagtagagacggggtttcaccgtgttagccaggatggtctcgatctcctaacctggtgatccgcccgcctcggcctcccaaaagtattgggattacccgcgtgagccaccgcgcccggctgcaaataatctttctttttttctttttttctgagacagagtctcgctctgttgcccaggctggagtgcagtggcacgatctcggctcacggcaccgtccgcctcccgggttcacgccattctcctgcctcagcttcccgagtagctgggactacaggggcccgccaccacgcccggctaactttttgtgtttttagtagagacggggtttcaccgtgttagccaggatggtctcgatctcctgaccttgtgatctgcccgcctcggcctcccaaagtgctgggattacaggcgtgacgaccgcgcccggcgcgaaacacgatattgtactaacatcttaattttgttataaaatctcacaaaccccctgacatagtctcagagatctgtagggccgaggttacatttggagaacccgtactctagggccaaatccattcttcttgccctggctcacttgtcccccccaccgccccgcgctggagccactgcctagttcttcagccctagatggtgctcgccagacctcctctcaatgctcatcacacacagggctattcctttcctccaatgaaccaaaccgcctcccgcccacctccaggtcccagtcctctgttccctttgcctggtccacccttgccctccctgggtcgcagacgaggtcggcctcgtcattccccgcagaccgccgcgcgtccctcttgtgcggttcaccacagttgtatttaagtgatcgtgtgagtcgtcgttaaatgcctgtctccccgcggatcatgggctcctcgaggacagggactggcctgtctgtccactgctgtaaccccgcgccggcatagggacctaaggcccactggagggcgctcatcaagtagctgctggatgttgacgaaggaagcggcggcgcagctcagggatctccgagtcaggacggtcggccagacccacggggtaacgggtctaatcgtgtaggaataaagctgtattccagtgcttccaaaaaaaaaaaaaaaaaaaaaaaaaaaaaaaaaaaaaaaaaaaaaaaa

SEQ ID NO: 22742 - DNA, 2090 bp, Homo Sapiens
caaagcccccgcgggctcgcccgggcgcccggatgccagccccgagccccgccgccgggtgcatgcctcccccgcggcgcgcccccgcaggctgctgcccgctgtgaccgcccttccccgcaggcgggcgccggccaggctctccccgagatcagcgcacgggtggcacccgccggacccccagcggcagcggcggcggcggctgcagggggcgcggggcggaggctgcgagggcgcgcgcggggaggatggacgggtccggggagcgcagcctcccggagccgggcagccagagctccgctgccagcgacgacatagagatagtcgtcaacgtggggggcgtgcggcaggtgctgtacggggacctcctcagtcagtaccctgagacccggctggcggagctcatcaactgcttggctgggggctacgacaccatcttctccctgtgcgacgactacgaccccggcaagcgcgagttctactttgacagggacccggacgccttcaagtgtgtcatcgaggtgtactatttcggggaggtccacatgaagaagggcatctgccccatctgcttcaagaacgagatggacttctggaaggtggacctcaagttcctggacgactgttgcaagagccacctgagcgagaagcgcgaggagctggaggagatcgcgcgccgcgtgcagctcatcctggacgacctgggcgtggacgcggccgagggccgctggcgccgctgccagaagtgcgtctggaagttcctggagaagcccgagtcgtcgtgcccggcgcgggtggtggccgtgctctccttcctgctcatcctcgtctcgtccgtggtcatgtgcatgggcaccatccccgagctgcaggtgctggacgccgagggcaaccgcgtggagcacccgacgctggagaacgtggagacggcgtgcattggctggttcaccctggagtacctgctgcgcctcttctcgtcacccaacaagctgcacttcgcgctgtccttcatgaacattgtggacgtgctggccatcctccccttctacgtgagcctcacgctcacgcacctgggtgcccgcatgatggagctgaccaacgtgcagcaggccgtgcaggcgctgcggatcatgcgcatcgcgcgcatcttcaagctggcccgccactcctcgggcctgcagaccctcacctatgccctcaagcgcagcttcaaggaactggggctgctgctcatgtacctggcagtgggtatcttcgtcttctctgccctgggctacaccatggagcagagccatccagagaccctgtttaagagcatcccccagtccttctggtgggccatcatcaccatgaccaccgtcggctacggcgacatctaccccaagaccacgctgggcaagctcaacgcggccatcagcttcttgtgtggtgtcatcgccatcgccctgcccatccaccccatcatcaacaactttgtcaggtactacaacaagcagcgcgtcctggagaccgcggccaagcacgagctggagctgatggaactcaactccagcagcgggggcgagggcaagaccgggggctcccgcagtgacctggacaacctccctccagagcctgcggggaaggaggcgccgagctgcagcagccggctgaagctctcccacagcgacaccttcatccccctcctgaccgaggagaagcaccacaggacccggctccagagttgcaagtgacaggagggcccctcaggcagagatggaccaggcggtggacagatgggtagatgtggcaggcatgtcatcgacagcacagaagggctgtcctgtgtccccccaaccctcccctggacagactctgaaggccctcccggcacctctgccaaggctgggtaagactcctctatgttgcctgctgtccaggagcccgggagggaggggtgtgcaggagccgcagggccgtgtgggacgagtggaggccgcggcctggctggcacgagagcccacgcccgcttctgtatctccctcaataaagcctcctgctctgtgcaccctcaaaaaaaaaaaaaaaaaaaaaaaaaaaaaaaaaaaaaa

SEQ ID NO: 22743 - DNA, 5482 bp, Homo Sapiens
atttatattcattttttactcttttccatcaaaacataattttactaagtacgcatgttctgtgtccgtgttttgtcatcactgaagccacttttggagtcacctagtaatagcctttccactctatctagttctgtagcttttatgtgtgtaaattacttcaaatctgtttatgatcctattgctggaaactttatcccaagacacaaaaatcttttctattagaagttattaactttaaaacaattatttattttattttattttattttttgagacagagtctcgctttgtcacccaggctggagtgcagtggcacgatctcggctcactgcaagctccacctcccgagttcatgccattctcctgcctcagcctcccgagtagctgggactacgggcgtccgccaccatgcccagctaattttttttgtatttttggtagagacaaggtttcaccgtgttagccaggatggtcttgatctcctgacctcgtggtccacctgcctcggcctcccaaagcgctgggattataggcgtgagccaccgcacctggcctaaaacaattatttctttaaaaaaacataccctctattctattttgtgtcttcacaacacaatcacttactgtattgctttttaaagtgatctttaaagagtcttgcagaagagactacacagcaggcccgagaccatcctgagaggcctgtgtgcaaggctggccccccgctgtgtcaggacggtgcccaccaccctcaatgaagaggggctccctgtgcttagctgcttgtgtggggaacaagggcactgtttgaagaagcaaacatggtagcatcaagcattccttgaaatatggctccaagggaacaatgagacgtgctcttggtcttggaagctcatcagaatgtttagagctggggaggcctccaaacgcccattgcctgggccgtcgcccccaagggtgcggagtgtggaggttgcccgggggagggccggctacggattcacgctttcgggacaggcaccctgtgtgctcagctgcgtcatgagagggagccctgcggatttcgtgggcctccgagctggagaccagatacttgctgtcaatgaaatcaacgtgaaaaaagcatctcatgaagatgtagtgaaattaattgggaagtgctctggtgtccttcacatggtgattgctgaaggcgtcggccgcttcgaatcctgttccagtgatgaagaagggggactctatgaaggaaaaggctggctgaagcccaagctggattctaaagcactaggtataaacagagcagagcgagtcgtggaggaaatgcagtctggtggaattttcaatatgatttttgaaaacccgagcctttgtgcgagcaattcagagcccttgaaattgaaacaaagatccctttcggagtcggccgcaactcgatttgatgttggacatgaaagtataaataatccaaatcccaacatgctttctaaggaggaaatatcaaaagttattcatgatgattcggttttcagcattggactagaaagtcatgacgattttgcattggatgcaagtattttaaacgtggcgatgatcgtgggctacttaggctccattgagcttccttccacgagctccaacctggagtccgacagcttgcaagccatccgcggctgcatgcggcgcctgcgggcagagcagaaaatccactcgctggtgaccatgaagatcatgcacgactgtgtgcagctgagcactgacaaggctggagtcgtggccgagtacccggccgagaagctggccttcagcgccgtgtgcccggacgaccggcgatttttcgggttggttaccatgcagacgaatgacgacgggagcctggcccaggaggaggagggcgccctgcggacttcctgccacgtgttcatggtggacccagacttgtttaatcacaagatccaccaaggcattgctcggcggtttgggtttgagtgcacggccgacccagacaccaatggctgtctggaattcccggcgtcctccctccccgtcctgcagttcatctctgtcctgtaccgagacatgggtgagctgattgagggcatgcgggcccgcgcctttctggacggggacgccgatgcccaccagaacaacagcaccagcagcaacagtgacagcggcattgggaacttccaccaggaggagaagagcaaccgggtccttgtggtggacctgggtgggagctcgagcagacacggccccggaggcagcgcgtgggacggtgtgggtgggaggggtgcccagccctggggtgctccctggactgggcccttctgtccggaccccgaagggagccccccatttgaggccgctcatcagactgacaggttctgggacctaaacaagcacctagggccagcctctcctgtggaggtgcccccagcttccttgaggagctcagtccccccttccaagaggggcaccgtgggtgctggctgtggtttcaaccagcgctggctcccggtccacgtgctccgggagtggcagtgcggacacaccagcgaccaggactcttacacagattccaccgatggctggtccagcatcaactgcggcacactgccccctcctatgagcaagatccccgcagaccgctacagggtggagggcagcttcgcgcagcccccgctgaatgccccgaagagggagtggtccaggaaggcctttggaatgcaaagcatttttggtccccatcgaaatgttcgaaagactaaggaagataaaaagggctcaaaatttgggcggggaactggactcactcagccttctcaacgcacgtctgctcggagatcatttgggagatccaagagattcagtatcactcgctcccttgatgatcttgagtctgcaactgtgtctgatggcgagttgacgggcgccgacctgaaggactgcgtcagcaacaacagcctgagcagcaatgccagcctccccagcgtgcagagctgccggcgcctgcgtgagaggagggtcgccagctgggccgtgtcctttgagcgcctgctgcaggaccccgtcggtgtccgctacttctctgattttctaaggaaagaattcagtgaagaaaacattttattctggcaggcctgtgaatattttaatcatgttcctgcacatgacaaaaaggagctttcctacagggcccgggagattttcagtaagtttctctgcagcaaagccaccaccccggtcaacatcgacagccaggcccagctagcagacgacgtcctccgcgcacctcacccagacatgttcaaggagcagcagctgcagatcttcaatctcatgaagtttgatagctacactcgctttctgaagtccccgctgtaccaggaatgcatcctggcggaagtggagggccgtgcactcccggactcgcagcaggtccccagcagcccggcttccaagcacagcctcggttcagaccactccagtgtgtccacgccaaaaaagttaagtggaaaatcaaaatccggccgatccctgaatgaagagctgggggatgaggacagcgagaagaagcggaaaggcgcgtttttctcgtggtcgcggaccaggagcaccgggaggtcccagaaaaagagggagcacggggaccacgcagacgacgccctgcatgccaatggaggcctgtgtcgccgagagtcgcagggctctgtgtcctctgcggggagcctggacctgtcggaggcctgcaggactttggcacccgagaaggacaaggccaccaagcactgctgcattcatctcccggatgggacatcctgcgtggtggctgtcaaggcgggcttctccatcaaagacatcctgtccggactctgtgagcggcatggcatcaacggggcggccgcggacctcttcctggtgggcggggacaagcctctggtgctgcaccaagacagtagcatcttggagtcaagggacctgcgcctagaaaagcgcaccttgtttcggctggatcttgttccgattaaccggtcagtgggactcaaggccaagcccaccaagcccgtcacggaggtgctgcggcccgtggtggccagatacggcctggacctcagtggcctgctggtgaggctgagtggagagaaggagcccctggaccttggcgcccctatatcgagtctggacggacagcgggttgtcttggaggagaaggatccttccagaggaaaggcatccgcagataaacagaaaggtgtgccagtgaaacagaacacagctgtaaattccagctccagaaaccactcggctacgggagaggaaagaacactaggcaagtctaattctattaaaataaaaggagaaaatggaaaaaatgctagggatccccggctttcaaagagagaagaatctattgcaaagattgggaaaaaaaaatatcagaaaattaatttggacgaagcagaggagttttttgagcttatttccaaagctcagagcaacagagcagatgaccaacgtgggctgctaaggaaggaagacctggtgttgccagagttcctccgtttacctcctggttccacagaactcaccctccccactccagctgctgtggccaagggctttagcaagagaagcgccacaggcaacggccgggagagcgcctcccagcctggcgagcagtgggagccagtccaggagagcagcgacagtccgtccaccagcccgggctcagcctccagcccccctggacctcctgggacgaccccccccgggcagaagtctcccagcgggcccttctgcactccccagtcccccgtctccctcgcgcaggagggcaccgcccagatctggaagaggcagtctcaggaagtggaggccgggggcatccagacggtggaggatgagcacgtggccgagctgaccctgatgggggagggggacatcagcagccccaacagcaccttgctgccgccgccctccaccccccaggaagtgccaggaccttccagaccaggaagtgggacccatggcagccgagacctcccagtcaacagaatcatcgatgtggatcttgtaactggctcggcgcccgggcgggatggtggcatagcgggggcacaggctggccctgggaggtcgcaggccagtggtgggcctcctacatcagacctccctggcttgggccccgtcccgggtgagcctgctaagcccaagaccagcgctcaccacgccaccttcgtctgagctgccctggcctggccaactctcctgtggacatgtcggggtggggcagcccaggtggattctgtgggcctcaggggggccaccctggccaccacaccctcaggagcccagccaggagggcagggggtgacctcgctggaggcactggccccggacattcgccatgctggccatggggctccctggccctggcctcctgctgcccaataaagcatttctgaaaaaaaaaaaaaaa

SEQ ID NO: 22744 - DNA, 3724 bp, Homo Sapiens
  misc_feature (2877)..(2877): n is a, c, g, or t
  misc_feature (3380)..(3380): n is a, c, g, or t
gcctggcaccggggaccgttgcctgacgcgaggcccagctctacttttcgccccgcgtctcctccgcctgctcgcctcttccaccaactccaactccttctccctccagctccactcgctagtccccgactccgccagccctcggcccgctgccgtagcgccgcttcccgtccggtcccaaaggtgggaacgtgtccgccccggcccgcaccatggcacggttcggcttgcccgcgcttctctgcaccctggcagtgctcagcgccgcgctgctggctgccgagctcaagtcgaaaagttgctcggaagtgcgacgtctttacgtgtccaaaggcttcaacaagaacgatgcccccctccacgagatcaacggtgatcatttgaagatctgtccccagggttctacctgctgctctcaagagatggaggagaagtacagcctgcaaagtaaagatgatttcaaaagtgtggtcagcgaacagtgcaatcatttgcaagctgtctttgcttcacgttacaagaagtttgatgaattcttcaaagaactacttgaaaatgcagagaaatccctgaatgatatgtttgtgaagacatatggccatttatacatgcaaaattctgagctatttaaagatctcttcgtagagttgaaacgttactacgtggtgggaaatgtgaacctggaagaaatgctaaatgacttctgggctcgcctcctggagcggatgttccgcctggtgaactcccagtaccactttacagatgagtatctggaatgtgtgagcaagtatacggagcagctgaagcccttcggagatgtccctcgcaaattgaagctccaggttactcgtgcttttgtagcagcccgtactttcgctcaaggcttagcggttgcgggagatgtcgtgagcaaggtctccgtggtaaaccccacagcccagtgtacccatgccctgttgaagatgatctactgctcccactgccggggtctcgtgactgtgaagccatgttacaactactgctcaaacatcatgagaggctgtttggccaaccaaggggatctcgattttgaatggaacaatttcatagatgctatgctgatggtggcagagaggctagagggtcctttcaacattgaatcggtcatggatcccatcgatgtgaagatttctgatgctattatgaacatgcaggataatagtgttcaagtgtctcagaaggttttccagggatgtggaccccccaagcccctcccagctggacgaatttctcgttccatctctgaaagtgccttcagtgctcgcttcagaccacatcaccccgaggaacgcccaaccacagcagctggcactagtttggaccgactggttactgatgtcaaggataaactgaaacaggccaagaaattctggtcctcccttccgagcaacgtttgcaacgatgagaggatggctgcaggaaacggcaatgaggatgactgttggaatgggaaaggcaaaagcaggtacctgtttgcagtgacaggaaatggattagtcaaccagggcaacaacccagaggtccaggttgacaccagcaaaccagacatactgatccttcgtcaaatcatggctcttcgagtgatgaccagcaagatgaagaatgcatacaatgggaacgacgtggacttctttgatatcagtgatgaaagtagtggagaaggaagtggaagtggctgtgagtatcagcagtgcccttcagagtttgactacaatgccactgaccatgctgggaagagtgccaatgagaaagccgacagtgctggtgtccgtcctggggcacaggcctacctcctcactgtcttctgcatcttgttcctggttatgcagagagagtggagataattctcaaactctgagaaaaagtgttcatcaaaaagttaaaaggcaccagttatcacttttctaccatcctagtgactttgctttttaaatgaatggacaacaatgtacagtttttactatgtggccactggtttaagaagtgctgactttgttttctcattcagttttgggaggaaaagggactgtgcattgagttggttcctgctcccccaaaccatgttaaacgtggctaacagtgtaggtacagaactatagttagttgtgcatttgtgattttatcactctattatttgtttgtatgtttttttctcatttcgtttgtgggtttttttttccaactgtgatctcgccttgtttcttacaagcaaaccagggtcccttcttggcacgtaacatgtacgtatttctgaaatattaaatagctgtacagaagcaggttttatttatcatgttatcttattaaaagaaaaagcccaaaaagcagtaaaatttccatttctccctgttattttagttgccttatctggagagacgtggaggtgattttctttttttaaattattattaagacagaatgtgaaggcacaagcaggcttctgagccacttgtcagattgtattcaaagcatcaatccaagaggaggttatgtgtacttcatttattggtgatagttggaagagactgcagactactgctttgaatgagttgaattacataagctaagatcactataaggtccatttcttgaacccacttatacataaaatgtaacccatttagaaaaagattctggatatcatccccccttgaaagatagaaagcattcaggatgtcccagttatcacatgttcacacttgggtttaggggtgtttttttttaaaaccaggcaggttagctagcccaccctgtgctagttttcatgttcacgctgaccctatttgaattaatatcctttgttagagtggtcgagatttcaaacccaattatgtacanggagctgtctgagagctagccagaactggggtacagcctgggctcagggaatagctgtcaacactcgggcaaagtttttgtctgcagcaacgtgtatcaccatttgttttgggatccagtttttgttttaagagagtataaggtgtctcatttgagtctttttcttacctagccccctcttatcagtaaaacaaaggacttgccatggttcacagcaatgtgctacgatccaagatatcaaccaaggagcccacttaggggagaactaggtgtccagatttttgtatgtgttgtttttcttgggggatggggtggggtgggagtaggtagagctgagaatactacatcttagtggtgacctttagccacgtgggtgaagtggcaaaggccatggccatatctgttgtcccaggccaaagactaacaactgccttgggaatcccttccttgtgtccttaccaaatgatagctcataaaactctgataatgtaacaaatcacttncaaaggagttcccagaagtcttcagaaagactaaaattctgtctcttcctgctttagacagccattaagatcccaactaattttaccgaacctaaaacccacaaagaggttgtttgtgttattgttcaatcttcagttgtaagagtaattctctatttttatattgaaacataattacttgatagctcagggtctacacttcattcaactttttacaccaaattctgcagagtggtcaaaatggaatattgggggctgttgtaaacagaggcttaattttattagaagtagccagttatttattaaagcatgatgttaataaaataggcatattccaaaaaaaa

SEQ ID NO: 22745 - DNA, 5298 bp, Homo Sapiens
tggcttaagccgcgcggagcagcgcaacctgggtcgctccctgcttcgccgccgcctccggaccgagccagcggagtcagtgtcctagagaccctgtaacaccacaaagcggacgaaggagtccatgttggggaacttggcagcggagtgactgggacctgggaacctactgtggggccgcggccggaccgagcgcctcgacctcggtctgaggaaacccttttccaaagagaaatgaagaagaaaactgtatgtaccctaaatatgggagataagaagtatgaagacatggaaggtgaagaaaacggagataatactatttccactggtctgttgtacagtgaggctgacagatgcccaatatgtcttaattgtctattagaaaaggaagttggttttccagaaagctgtaatcatgtgcttctgtatgacttgtattcttaaatgggcagagacactggcttcatgtcctattgaccgtaaaccttttcaggcagtgtttaaattcagtgcattggaaggttatgttaaggttcaagtaaaaaaacagctgagagaaacaaaagacaagaaaaatgaaaactcatttgagaaacaggtctcctgtcatgaaaattctaaaagctgtataagaagaaaagccatcgtaagagaagatctattaagtgcaaaagtttgtgacttgaagtggatacatagaaactctttatacagtgaaacaggaggaaagaaaaatgcagcaataaagataaataagcctcagagatcaaattggagtacaaatcagtgcttcagaaattttttctccaatatgttttcttctgttagccactctggagaatcttcctttacctatagagcttattgtacagaatttatagaagccagtgaaatcagtgcattgattaggcagaagagacatgaactggaattgtcatggtttcctgatacattacctggaattggaagaattggttttataccctggaatgttgaaacagaagtccttcctctcatttcttctgtgttgccaagaactatttttccaacaagtaccatatctttcgaacattttggtacttcttgcaagggatatgcattagcacatactcaagaaggggaagaaaagaagcaaacttctggtacatcaaataccagaggatcaagacgaaaacctgcaatgacaactcctacaaggaggtctacacgtaacacaagagctgaaacagccagtcagtctcagagatccccaatatcagacaattctgggtgtgatgccccaggtaacagtaatccatctttaagtgttccctcttcagctgagtcagaaaagcaaacaagacaggctccaaaacggaagtctgtaagaagaggaagaaaaccacctttactgaaaaagaaacttcggagctctgtagctgcccctgaaaaatcatcttccaatgattcagtagatgaagaaacagcagaatctgacacatcacctgtgttagaaaaagagcaccaaccagatgtagacagtagtaacatttgtactgtgcagactcatgtagaaaaccagtctgctaattgcttgaaaagttgcaatgagcaaatagaagaaagtgagaagcatactgcaaattatgatacagaggaaagagtaggatcttcatcttctgagtcttgtgctcaagatcttcctgtgctagttggtgaggaaggggaagttaaaaaactcgagaatacaggtatagaggctaatgttttgtgtttggaaagtgagatttctgaaaatattcttgaaaaaggaggtgatccattggaaaagcaagaccagatatctggactttcacaatcagaggtaaagacagatgtatgtacagttcatcttccaaatgattttcctacatgtttaacatctgaaagcaaagtgtaccaacctgtatcttgtcccctaagtgacttatctgagaatgtagagtcagtggttaatgaagaaaaaataacagagagttccctagtagaaattactgaacataaagattttacactaaaaacagaggagcttatagagagccccaagttagaatcttctgagggtgaaattatacagacagtggacagacaatctgttaagagcccagaggttcaattgcttgggcatgttgaaactgaagatgtagaaataattgcaacatgtgatacttttgggaatgaagatttcaataatattcaagactctgaaaataacttactaaaaaataatcttctgaacaccaaattggaaaaatctttagaagaaaagaatgaatcgctgaccgaacatcctagatctacagagttgcctaaaacacacattgaacagattcagaagcattttagtgaggacaacaatgaaatgatacctatggagtgtgattcattttgcagtgaccaaaatgaatctgaagttgaaccatctgtaaatgctgatcttaaacaaatgaatgaaaattctgtgacacactgttctgaaaataatatgccgtcttctgatcttgcggatgaaaaggttgaaactgtttctcaaccatctgaaagcccaaaagataccatagataaaaccaaaaagcctcgtactcgaagatctagatttcattctccatctacaacttggtcacccaacaaagacactccacaagaaaagaagcggccccagtctccatctcccagaagagaaactgggaaagaaagcaggaagtctcaatcaccatctcctaagaatgagtcagccagaggccggaaaaaatcccgttctcagtccccaaaaaaggatattgcaagagaaaggaggcaatctcagtctcggtctccaaaaagggatactactagggaaagcagaagatctgaatcactgtccccaagaagagaaacttctagagagaacaaaagatctcagccaagagtgaaagattcttccccaggagaaaaatccaggtcccagagcagagaacgagaaagtgatagagatgggcagaggagagagagagaaaggagaaccagaaagtggtctaggtccagatctcattctaggtccccctcaagatgtagaacaaaaagtaagagttcatcatttggtagaattgacagagatagttactctccccggtggaagggaagatgggcaaatgatggttggagatgtccacgaggaaatgatcggtacagaaagaatgacccagagaaacagaatgaaaatacaagaaaagaaaaaaatgacatccatctagatgctgatgatccaaattctgctgacaaacatagaaatgactgtcccaattggataacagaaaaaataaactctgggcctgatccaagaaccagaaatccagaaaagttgaaagagtctcattgggaagaaaatagaaatgaaaattcaggaaattcttggaataaaaactttggttctggttgggtatctaaccgtggtagaggcagaggcaaccgtggcagaggcacttacagaagtagttttgcctataaagatcagaatgaaaatcggtggcaaaatcgaaaacccctctcagggaattcaaacagttcagggagtgaatctttcaagtttgtggaacagcaatcctataagcgaaaaagtgaacaggagttctcatttgatacaccagcagatagatctggatggacatctgcatccagctgggccgtgagaaagactttgccagcagatgtacaaaactactactcacgacgaggcagaaattcttcaggtccacagtctggatggatgaaacaagaggaggaaacatctggacaggattctagcctaaaagaccaaacaaaccagcaagttgatggttctcagctacctataaatatgatgcaaccgcaaatgaatgtaatgcagcaacaaatgaatgcacaacaccagcctatgaatatcttcccatatccagtgggtgttcatgctcctttgatgaacatccaacgcaatccatttaacattcatcctcagctacccttgcatctccacacaggagtgcccctcatgcaggtagccactcctaccagtgtatctcagggactaccaccaccaccaccccctcccccaccatcccaacaagtcaactacattgcttcacaaccagatggaaagcaattgcagggtattcctagttcttctcatgtaagtaataacatgagtacaccagttttgcctgctccgacagcagccccaggaaatacgggaatggttcagggaccaagttctggtaatacttcgtcatcaagtcacagcaaagcctctaatgctgctgtaaaattggcagaaagcaaagtaagtgttgcagtggaagccagcgcagatagctcgaagacagacaagaaattgcaaattcaagaaaaagcagcacaagaggtaaaattggccatcaagccattttaccaaaataaagatatcaccaaggaagaatataaagaaattgtacggaaagcagtagataaagtttgtcatagtaagagtggagaagtaaattctactaaagtggcaaatctggttaaagcctatgtagacaaatacaaatattcacggaaggggagccaaaagaaaactctggaagaacctgtgtctactgaaaaaaacataggctgaaatggggaacgctgtcaaggacattatcaggatatctgcaaagtgcaatttcaacatgtaccattaactgaaaatcatacataactgtgattgaaatttggttttgataaaattatttttttaacataggatatgatgttttgttctaaataaatataggtctgcactgcaacttctgtatccttccttcccctccaccctcccccacaaaattcaagggaaagtaaagggtttaaaggaatgtgcatctttactaggactgtgttatagtgtggatactggaaaatgtatagctttttgattagggcaatggagtgcataaattagaaactttctaagtgcactggttttcaaagagatatatataatgcatttattctgtcaggttaaaatataaagtatgatctttatgattttttccctctaattatagaaagttaaataatgtattaccatgaaaaatgtttctaatattaaatagaacatatcagttgcaaagttcctaatgtgtatttttaaagcacatatctgaataaattgcctagatagaaaaaaaattatcatcgagtaaaatttagtgttcaaaacattgagacactcttcacctattgtatgaccaaataaaggttatgctgcttgttaaaaaaaaaaaaaaaaaaaaaaaaaaaaaa

SEQ ID NO: 22746 - DNA, 1936 bp, Homo Sapiens
caaagtgctcagcataagggagccagcgcacagacagccaggaagggagccgcctcagaacgatggatctgcatctcttcgactactcagagccagggaacttctcggacatcagctggccatgcaacagcagcgactgcatcgtggtggacacggtgatgtgtcccaacatgcccaacaaaagcgtcctgctctacacgctctccttcatttacattttcatcttcgtcatcggcatgattgccaactccgtggtggtctgggtgaatatccaggccaagaccacaggctatgacacgcactgctacatcttgaacctggccattgccgacctgtgggttgtcctcaccatcccagtctgggtggtcagtctcgtgcagcacaaccagtggcccatgggcgagctcacgtgcaaagtcacacacctcatcttctccatcaacctcttcagcagcattttcttcctcacgtgcatgagcgtggaccgctacctctccatcacctacttcaccaacacccccagcagcaggaagaagatggtacgccgtgtcgtctgcatcctggtgtggctgctggccttctgcgtgtctctgcctgacacctactacctgaagaccgtcacgtctgcgtccaacaatgagacctactgccggtccttctaccccgagcacagcatcaaggagtggctgatcggcatggagctggtctccgttgtcttgggctttgccgttcccttctccattatcgctgtcttctacttcctgctggccagagccatctcggcgtccagtgaccaggagaagcacagcagccggaagatcatcttctcctacgtggtggtcttccttgtctgctggttgccctaccacgtggcggtgctgctggacatcttctccatcctgcactacatccctttcacctgccggctggagcacgccctcttcacggccctgcatgtcacacagtgcctgtcgctggtgcactgctgcgtcaaccctgtcctctacagcttcatcaatcgcaactacaggtacgagctgatgaaggccttcatcttcaagtactcggccaaaacagggctcaccaagctcatcgatgcctccagagtctcagagacggagtactctgccttggagcagagcaccaaatgatctgccctggagaggctctgggacgggtttacttgtttttgaacagggtgatgggccctatggttttctagagcaaagcaaagtagcttcgggtcttgatgcttgagtagagtgaagaggggagcacgtgccccctgcatccatttctctttctcttgatgacgcagctgtcatttggctgtgcgtgctgacagttttgcaacaggcagagctgtgtcgcacagcagtgctgtgcgtcagagccagctgaggacaggcttgcctggacttctgtaagataggattttctgtgtttcctgaattttttatatggtgatttgtatttaaattttaagactttattttctcactattggtgtaccttataaatgtatttgaaagttaaatatattttaaatattgtttgggaggcatagtgctgacatatattcagagtgttgtagttttaaggttagcgtgactttcagttttgactaaggatgacactaattgttagctgttttgaaattatatatatataaatatataaatatatgccagtcttggctgaaatgttttatttaccatagttttatatctgtgtggtgttttgtaccggcacgggatatggaacgaaaactgctttgtaatgcagtttgtgacattaatagtattgtaaagttacattttaaaataaacaaaaaactgttctggactgcaaatctgcacacacaacgaacagttgcatttcagagagttctctcaatttgtaagttatttttttttaataaagatttttgtttcct

SEQ ID NO: 22747 - DNA, 1371 bp, Homo Sapiens
ctccttccaagaagagcagcaaagctgaagtagcagcaacagcaccagcagcaacagcaaaaaacaaacatgagtgtgaagggcatggctatagccttggctgtgatattgtgtgctacagttgttcaaggcttccccatgttcaaaagaggacgctgtctttgcataggccctggggtaaaagcagtgaaagtggcagatattgagaaagcctccataatgtacccaagtaacaactgtgacaaaatagaagtgattattaccctgaaagaaaataaaggacaacgatgcctaaatcccaaatcgaagcaagcaaggcttataatcaaaaaagttgaaagaaagaatttttaaaaatatcaaaacatatgaagtcctggaaaagggcatctgaaaaacctagaacaagtttaactgtgactactgaaatgacaagaattctacagtaggaaactgagacttttctatggttttgtgactttcaacttttgtacagttatgtgaaggatgaaaggtgggtgaaaggaccaaaaacagaaatacagtcttcctgaatgaatgacaatcagaattccactgcccaaaggagtccagcaattaaatggatttctaggaaaagctaccttaagaaaggctggttaccatcggagtttacaaagtgctttcacgttcttacttgttgtattatacattcatgcatttctaggctagagaaccttctagatttgatgcttacaactattctgttgtgactatgagaacatttctgtctctagaagttatctgtctgtattgatctttatgctatattactatctgtggttacagtggagacattgacattattactggagtcaagcccttataagtcaaaagcatctatgtgtcgtaaagcattcctcaaacattttttcatgcaaatacacayttctttccccaaatatcatgtagcacatcaatatgtagggaaacattcttatgcatcatttggtttgttttataaccaattcattaaatgtaattcataaaatgtactatgaaaaaaattatacgctatgggatactggcaacagtgcacatatttcataaccaaattagcagcaccggtcttaatttgatgtttttcaacttttattcattgagatgttttgaagcaattaggatatgtgtgtttactgtactttttgttttgatccgtttgtataaatgatagcaatatcttggacacatttgaaatacaaaatgtttttgtctaccaaagaaaaatgttgaaaaataagcaaatgtatacctagcaatcacttttactttttgtaattctgtctcttagaaaaatacataatctaatcaaaaaaaaaaaaaaaaaaaaaa

SEQ ID NO: 22748 - DNA, 5043 bp, Homo Sapiens
cgggattcggctggctctgccacaccaccgcgcgcccccgctccgcccgcccctccgggcgcgtcttttccgggctcgcgctgagtcccgcctccgccggctgtccgggtgcgcgcgcgccgctgcggctttttctctggcctccgccgcgcgctcctcctcgtcccagcgctagcgggcacgcggttcctttttgcgagctttccgagtgccaggcgccggccggctgcgaagacgcggtgggccgcccctccgattgaaatcacagaagatattcgtgttcttcttaagagaaaaagaggacatttaaaaacgctatggcaaagagaataaaagctaagcccacttcagacaaacctggaagtccatatcgctctgtcacacacttcgactcactagctgtaatagacatccctggagcagatactctggataaattatttgaccatgctgtatccaagtttgggaagaaggacagccttgggaccagggaaatcctaagtgaagaaaatgaaatgcagccaaatggaaaagtttttaagaagttaattcttgggaattataaatggatgaactatcttgaagtgaatcgcagagtgaataactttggtagtggactcactgcactgggactaaaaccaaagaacaccattgccatcttctgtgagaccagggccgaatggatgattgcagcacagacctgctttaagtacaactttcctcttgtgactttatatgccacacttggcaaagaagcagtagttcatgggctaaatgaatctgaggcttcctatctgattaccagtgttgaacttctggaaagtaaacttaagactgcattgttagatatcagttgtgttaaacatatcatttatgtggacaataaggctatcaataaagcagagtaccctgaaggatttgagattcacagcatgcaatcagtagaagagttgggatctaacccagaaaacttgggcattcctccaagtagaccaacgccttcagacatggccattgttatgtatactagtggttctactggccgacctaagggagtgatgatgcatcatagcaatttgatagctggaatgacaggccagtgtgaaagaatacctggactgggaccgaaggacacatatattggctacttgcctttggctcatgtgctagaactgacagcagagatatcttgctttacctatggctgcaggattggatattcttctccgcttacactctctgaccagtccagcaaaattaaaaaaggaagcaaaggagactgtactgtactgaagcccacacttatggctgctgttccggaaatcatggatagaatttataagaatgttatgagcaaagtccaagagatgaattatattcagaaaactctgttcaagatagggtatgattacaaattggaacagatcaaaaagggatatgatgcacctctttgcaatctgttactgtttaaaaaggtcaaggccctgctgggagggaatgtccgcatgatgctgtctggaggggccccgctatctcctcagacacaccgattcatgaatgtctgcttctgctgcccaattggccagggttatggactgacagaatcatgtggtgctgggacagttactgaagtaactgactatactactggcagagttggagcacctcttatttgctgtgaaattaagctaaaagactggcaagaaggcggttatacaattaatgacaagccaaaccccagaggtgaaatcgtaattggtggacagaacatctccatgggatattttaaaaatgaagagaaaacagcagaagattattctgtggatgaaaatggacaaaggtggttttgcactggtgatattggagaattccatcccgatggatgtttacagattatagatcgtaagaaagatctagtgaagttacaagcaggagagtatgtatctcttgggaaagtagaagctgcactgaagaattgtccacttattgacaacatctgtgcttttgccaaaagtgatcagtcctatgtgatcagttttgtggttcctaaccagaaaaggttgacacttttggcacaacagaaaggggtagaaggaacttgggttgatatctgcaataatcctgctatggaagctgaaatactgaaagaaattcgagaagctgcaaatgccatgaaattggagcgatttgaaattccaatcaaggttcgattaagcccagagccatggacccctgaaactggtttggtaactgatgctttcaaactgaaaaggaaggagctgaggaaccattacctcaaagacattgaacgaatgtatgggggcaaataaaatgttgttgtcttattgacagttgtgcaggaggtagcctggtggttttcaacctctagaattttaagcctttgttgaactgttagaatgtaaggtatatcattctaaagatagagtaaaaagaaaacaaaaccaaaagttattaaaattgttgtccggtttactttaacttagttttgcatagttctagtgcagctgaaattgaaaagttatttccctttagctgtgttattatagagcagaaattctgtttttaaaaattagcctaagatatacttgtttttgtaaagaaaaatatttaatgttgaacaaaataaattggagttggagtagaatgtagtttgaggaaatttgcagcttccaatgcctcttgtcttcctatttcagaagtttaaatattaagcatgacagaaaatatgtattaacactactcaaagcaaaagtgctgcagggctttaaaattctcttccaaccatttatcttgaaggaaaaattcaatagtaatataatacacaaaatcaaataataccttagaaggtattaagattataattgttgcataggttagatatagagtcattgtaatgttgtgaataattacagtgcctaaaataagaatagaacaacatatacaacaccaaaaaatatctagtaatatatttaaagggaaattgagctgctttttttgaaactttgagatctaaaaataactgtaattatttgaatgactaagaggaaagtacattttttgaaatgctgaaaattgcctttctgtgtttattcaaactgaaaagctgagaccaagagcaaggaaggtaaaaagttaacaggcaaacattttctcttagaaaaggtgataaaatcataagtatttggaattagaacccttgcacagcactgaacctgggaaagagatttaaactctgaatttatctttgataacagggattgattttaaaatgtacatgtattaaattacatttgtaatttaaggtctgtttgctgttgctgattttattcttgatcagtagtttgcatttcagaaagcctttcattttgctttaagtttagcaaagcggggttataatgaatgacttccccaatatcttgcttgaacttacagtgattaacttggatgagttttgggaagttaaagggaagaaaacactgttatcattttttcctgtttgggaagagcttagaaactggaaatactagatttgggagaagggcagagttacttgataagggacttgatgtttgtgcagtaacttgggagtgtggtttctttttgaatctttaattaaaacctgggattatatatccctgataaatattcacacttgaaccatagttactgtaaaatgcaaaaaatcttaatactgttattctttgcactttttcttaatcattttttatatatatgcatatatatatgtgtgtgtgtgtgttgcttatgttgttttgtacagatgtgggccaccattgcaacaaaatacattctttttgctctaaaatatttatgaagaaaatacttaaatgttatgtatatggtggtaataagggaaaaatcaagtattataaacaagaatgaaggtttttgtaaagatttctgttcagcgttttgcaaggtaaaattttaggcaagttttccctgaagttatgtgtatgtgagtattctcattcttcccaacttgcctttgaagagtgaaataccattattatcaagtagactactgttcagcttttattccttccctggttgtttatcccttaggaatgagtttcttagactttcccaatatgtgattttttttcccatttagaatggtgattttaaatgtgtgagtgcatgtactatcttatctcagatatttgcacccccaatctgcccccaactcccaaaagctagaacactgccaactgatctgttataggtcctttagaaacacataattaacacttaaggttgggtgctgctaattctttgcaaaaatccaaatattgttaagggaccagggagatgccactaccccttgattttccatctaaaaatatacatgtttatgtaaacaaatctttccatatccatagtgacttttcaagtatttaagcctaaagattttgatctcacatttttatacctgtttaaattgctcacagttattacatacacatcagccatcaactaaagttgtactttaaaaatttactacaatatgtacatttctaagtcaaacacttgtgacttttgctttaattccatgaatgttcctgcctccttgatatttgtatttattctttttttctctagagtagaggtataattgtgtgatatttcagaaatacagataaatgattcaaaaagtcacagttaaggagaatcatgtttctttgatcatgaataactgattagtaagtcttgcctatattttcctgatagcatatgacaaatgtttctaaggtaacaagatgagaacagataaagattgtgtggtgttttggatttggagagaaatattttaatttttaaatgcagttacaaattataatgtattcatatttgtactttctgttaaaatgcatgattgcagaattgtttagattttgtgtttattcttgatgaaaagctttgtttgttcttgtttttaagtttgcactcaaatcttaagaaataaatccacccatgttatcaaaaaaaaaaaaaaaaaaa

SEQ ID NO: 22749 - DNA, 2636 bp, Homo Sapiens
cggggccacgggatgacgcctcctccgcccggacgtgccgcccccagcgcaccgcgcgcccgcgtccctggcccgccggctcggttggggcttccgctgcggctgcggctgctgctgctgctctgggcggccgccgcctccgcccagggccacctaaggagcggaccccgcatcttcgccgtctggaaaggccatgtagggcaggaccgggtggactttggccagactgagccgcacacggtgcttttccacgagccaggcagctcctctgtgtgggtgggaggacgtggcaaggtctacctctttgacttccccgagggcaagaacgcatctgtgcgcacggtgaatatcggctccacaaaggggtcctgtctggataagcgggactgcgagaactacatcactctcctggagaggcggagtgaggggctgctggcctgtggcaccaacgcccggcaccccagctgctggaacctggtgaatggcactgtggtgccacttggcgagatgagaggctacgcccccttcagcccggacgagaactccctggttctgtttgaaggggacgaggtgtattccaccatccggaagcaggaatacaatgggaagatccctcggttccgccgcatccggggcgagagtgagctgtacaccagtgatactgtcatgcagaacccacagttcatcaaagccaccatcgtgcaccaagaccaggcttacgatgacaagatctactacttcttccgagaggacaatcctgacaagaatcctgaggctcctctcaatgtgtcccgtgtggcccagttgtgcaggggggaccagggtggggaaagttcactgtcagtctccaagtggaacacttttctgaaagccatgctggtatgcagtgatgctgccaccaacaagaacttcaacaggctgcaagacgtcttcctgctccctgaccccagcggccagtggagggacaccagggtctatggtgttttctccaacccctggaactactcagccgtctgtgtgtattccctcggtgacattgacaaggtcttccgtacctcctcactcaagggctaccactcaagccttcccaacccgcggcctggcaagtgcctcccagaccagcagccgatacccacagagaccttccaggtggctgaccgtcacccagaggtggcgcagagggtggagcccatggggcctctgaagacgccattgttccactctaaataccactaccagaaagtggccgttcaccgcatgcaagccagccacggggagacctttcatgtgctttacctaactacagacaggggcactatccacaaggtggtggaaccgggggagcaggagcacagcttcgccttcaacatcatggagatccagcccttccgccgcgcggctgccatccagaccatgtcgctggatgctgagcggaggaagctgtatgtgagctcccagtgggaggtgagccaggtgcccctggacctgtgtgaggtctatggcgggggctgccacggttgcctcatgtcccgagacccctactgcggctgggaccagggccgctgcatctccatctacagctccgaacggtcagtgctgcaatccattaatccagccgagccacacaaggagtgtcccaaccccaaaccagacaaggccccactgcagaaggtttccctggccccaaactctcgctactacctgagctgccccatggaatcccgccacgccacctactcatggcgccacaaggagaacgtggagcagagctgcgaacctggtcaccagagccccaactgcatcctgttcatcgagaacctcacggcgcagcagtacggccactacttctgcgaggcccaggagggctcctacttccgcgaggctcagcactggcagctgctgcccgaggacggcatcatggccgagcacctgctgggtcatgcctgtgccctggctgcctccctctggctgggggtgctgcccacactcactcttggcttgctggtccactagggcctcccgaggctgggcatgcctcaggcttctgcagcccagggcactagaacgtctcacactcagagccggctggcccgggagctccttgcctgccacttcttccaggggacagaataacccagtggaggatgccaggcctggagacgtccagccgcaggcggctgctgggccccaggtggcgcacggatggtgaggggctgagaatgagggcaccgactgtgaagctggggcatcgatgacccaagactttatcttctggaaaatatttttcagactcctcaaacttgactaaatgcagcgatgctcccagcccaagagcccatgggtcggggagtgggtttggataggagagctgggactccatctcgaccctggggctgaggcctgagtccttctggactcttggtacccacattgcctccttcccctccctctctcatggctgggtggctggtgttcctgaagacccagggctaccctctgtccagccctgtcctctgcagctccctctctggtcctgggtcccacaggacagccgccttgcatgtttattgaaggatgtttgctttccggacggaaggacggaaaaagctctgaaaaaaaaaaaaaaaaaaaaaaaa

SEQ ID NO: 22750 - DNA, 2271 bp, Homo Sapiens
  misc_feature (252)..(252): n is a, c, g, or t
atgagctggtcaccttccctgacaacgcagacatgtggggcctgggaaatgaaagagcgccttgggacagggggatttggaaatgtcatccgatggcacaatcaggaaacaggtgagcagattgccatcaagcagtgccggcaggagctcagcccccggaaccgagagcggtggtgcctggagatccagatcatgagaaggctgacccaccccaatgtggtggctgcccgagatgtccctgaggggatgcanaacttggcgcccaatgacctgcccctgctggccatggagtactgccaaggaggagatctccggaagtacctgaaccagtttgagaactgctgtggtctgcgggaaggtgccatcctcaccttgctgagtgacattgcctctgcgcttagataccttcatgaaaacagaatcatccatcgggatctaaagccagaaaacatcgtcctgcagcaaggagaacagaggttaatacacaaaattattgacctaggatatgccaaggagctggatcagggcagtctttgcacatcattcgtggggaccctgcagtacctggccccagagctactggagcagcagaagtacacagtgaccgtcgactactggagcttcggcaccctggcctttgagtgcatcacgggcttccggcccttcctccccaactggcagcccgtgcagtggcattcaaaagtgcggcagaagagtgaggtggacattgttgttagcgaagacttgaatggaacggtgaagttttcaagctctttaccctaccccaataatcttaacagtgtcctggctgagcgactggagaagtggctgcaactgatgctgatgtggcacccccgacagaggggcacggatcccacgtatgggcccaatggctgcttcaaggccctggatgacatcttaaacttaaagctggttcatatcttgaacatggtcacgggcaccatccacacctaccctgtgacagaggatgagagtctgcagagcttgaaggccagaatccaacaggacacgggcatcccagaggaggaccaggagctgctgcaggaagcgggcctggcgttgatccccgataagcctgccactcagtgtatttcagacggcaagttaaatgagggccacacattggacatggatcttgtttttctctttgacaacagtaaaatcacctatgagactcagatctccccacggccccaacctgaaagtgtcagctgtatccttcaagagcccaagaggaatctcgccttcttccagctgaggaaggtgtggggccaggtctggcacagcatccagaccctgaaggaagattgcaaccggctgcagcagggacagcgagccgccatgatgaatctcctccgaaacaacagctgcctctccaaaatgaagaattccatggcttccatgtctcagcagctcaaggccaagttggatttcttcaaaaccagcatccagattgacctggagaagtacagcgagcaaaccgagtttgggatcacatcagataaactgctgctggcctggagggaaatggagcaggctgtggagctctgtgggcgggagaacgaagtgaaactcctggtagaacggatgatggctctgcagaccgacattgtggacttacagaggagccccatgggccggaagcaggggggaacgctggacgacctagaggagcaagcaagggagctgtacaggagactaagggaaaaacctcgagaccagcgaactgagggtgacagtcaggaaatggtacggctgctgcttcaggcaattcagagcttcgagaagaaagtgcgagtgatctatacgcagctcagtaaaactgtggtttgcaagcagaaggcgctggaactgttgcccaaggtggaagaggtggtgagcttaatgaatgaggatgagaagactgttgtccggctgcaggagaagcggcagaaggagctctggaatctcctgaagattgcttgtagcaaggtccgtggtcctgtcagtggaagcccggatagcatgaatgcctctcgacttagccagcctgggcagctgatgtctcagccctccacggcctccaacagcttacctgagccagccaagaagagtgaagaactggtggctgaagcacataacctctgcaccctgctagaaaatgccatacaggacactgtgagggaacaagaccagagtttcacggccctagactggagctggttacagacggaagaagaagagcacagctgcctggagcaggcctcatga

SEQ ID NO: 22751 - DNA, 5002 bp, Homo Sapiens
ggtacctgagagagagatgaaacacatagaaaggcacatacatcaaacaggaaaggctggagaatttaagaacaaaccatttagacaagtactacaaccccccaatgaaacaaaattaccaaaaattatgccagaagggcatggcatccagaacgcacagagaagaaagcaggtaaatgagagggaacagatgcagactaaggatcaccaggaacgcatgattcgagggagagaacttgcagaacaaagactcaaggagagaatcttgagaagaagccagagccagctacttacatatgagaagcatgagagagtaaaagagataaaggagtttgaaagagttattgcgtatcttcttttccaaccatgcagtagaagtcggattaaagtgagtattcttatggataagtctcagaatggagagaaggtgaatacaattgtgaaaccatatcaaagaaaattcttggcaatgccaccctttttaagaagtcaaataggaaaaataagagattaaagtttcaatgctgttatgataaaatcatatctcttaagtgaacccttttttttttcaaatgctcgttctctccagggttcagtgaatattcccatttgtatcagatacagatagatagttctgcacttgaaaattagcttaacttttttagttgacttgcatttgttcaagttgcatatcctttctagtgttcagtgtcctcatctttaaaatggcaataatatttgatggcatttatggaaggactgttttttttgtgaagtgtaggtatgtattagttgtttcataaatgttagtttccccacttggaaagaccggggttgggcaatggtggtgaataaagaattgttctaatctacttctcttattctccctgttcccagccctccaaggttattttgatgagattgctatagtttagtatatggtctttaatatcataccttcatcagataactactagccagcccctaaaagtgtaacttgctctgtacaatttatttgaatgagaaacttaattttgagagcctcctacatgctaggcattatgttagttactgaaggtgaataaagagaagtctctgcccttgaataattttcaactaatggcatagatcactctataaacagataatgtagtaaataaaggttacaatagaaaggtacagggtgctttacaaaggacggattctaacctggcccaggtgagcagggtgaaaaggaggaaggttagggaagggagtattatagtctgtcatgtttcttccagctttttttgtcacttcctatcacccacttaagcaagaccttcctaatgcttggatccactcagggataatcaaactcagcctttctcaaactcatgtttttggcactcattgataaatcagaaagcaaatttataaatttagtgagaattacagttgtcaagcagaatgaaatttgtgttttctagtcagtttattttcttcccagataccagaaagttgggaaagcaggggttcagagttggtaagcagagaagcaaataaatggaaatagatgccctcaggaatattatgcttaagttgtgataattctgatgcccaccttgctttactagcagaacaccctttaccctggatactgctaggtcagccactgatacaaatgttctgtgtctgtgctcctcagtacagtagcccttgctacacgtggctgttgaggcatttaaaatgtggctggtgcagctgtggaatggaatgtttaattgaatttcatttaaatttaaattgccacatgtggcaagtgactaccctgttgcacagtgtagcactggataaacataacttctgtgttctagattccagtcccaccattagctttctgtttttgacagtgtttgctggtatgataggtcactgttcattttacattactatcagtttagtttcctttgcatttcagaggctccctaatcccttaaagagatttaaaaatcaatgtagaccacttctgtgtgaaaataagatgactgaatttgctttgattggaattaggaactgacctctctttgctagttctggaatttggccaggatgcacatcaaaatctcattcctaccctcctgatttgcctcatggaaacttcgttgctgtgtctgttctctggtcctctattgctatgtctcagctttagattctatgttttgcatagaaatggatcatcagaatgcaacaggcagaagacttagaagtgcaaatcagtagggtaatgacaagccctttgagctgagtgggactgaaaagtaacctaacatataacctattagtaattgtttaccatgaaggttttcagtgctggacacataaattgctgagttcaactgccctctttcccctccaaatctagcataaaagcaactggtgctctcagggcaatttcacacctaatacggctaagaataaaagtctatgtttcaggaactcagtttgtccaaacctgcatccatcatctacctcaaattatatccaccttttcatttctttgcactgtgtctgcttaaatcttgagtcacacttaatgttttttttttggtcttttttctttttaatgtgaaatagaatatacaatacacaaatgaaaatgtatatttagaagaacaataataaatgtccaggtgcctgttgctcagactgagaaatggaacattactacatcccaggagcctcgtatgctctcattcatatctctctcccctgcagccagaggcaaccactatcctgaattttgtataactgtcacctagcttttatagattttactgtctgtgtatccctaacagttgcttatttatagcctttatataaatagaattatactgtatatgactgactacttttgctcattattatttttggattcatccatgttgatgtgtgacactgtagttcatttccatgacatgaatatgccacaacttaattatatattctgttgatgtcatttagttgtttccagtttttgttttatttttcttttaaaaatgatacttagataaacattaacatgtttaatcttatgttctggtgactgtgtactagatatatgtatgatatataaattgtggtacatttatttgacaggcctgatcttgaagcctgttagatttctgttcctttgtggcattatgcctgtaagcctgttctgtagagtctggcacatgttagcctcttaatagatatttgttgaaagaaaggacatttgttaactgctggagacaggcccaaaatacataaatagctgataacagaccactttagctttttactcatcttgtccaggtacaatcatagtcaacctctgtttatgcttatatttcagttgaggtactaaaatatttgtttacttagttggttttcagtgagcttccagtacaggatttgtttctctttctgtcacttttcccaaaactttcactccactgccttctagaaaagatcacccacatgtcatctcctcaaggcacctgcagcacgaaagttttatttctgaacaaaagggtccccagagaaggagacaaggagtctcctttcagtacgaggttgctggagtccctagagggtcaaaggctgtgtaataacagttccttcttgtctgctggacaaaagcttctgagccctcaagcaccctgtgacttagttctgatagagtactgagtttggaaatggcagagtggggacccaaaacaaatcttccaattccaaattcagttttatccaccttttcaaataagattaaaaaatgttaatgtctgttgatttgtgtgtgttgaaccactcttgtatccctgggatgaatcccaattaattgtggtatatttttgatatgttgttggattcagtttgctaaaattttgttcaggatttttgtgtatattttcactaggaagattggcctgtaattttctttttttttgtattcttctctgcttttggtatcagggcaatgcaggcttcataaaatgagttaagaataattccttcctcttcagttttttttaaatattttgagaagtattggtattaatttttctttgtatgtatggtagaatttgacaggaaagccatctggtcctgggcttttctttattgagacacttttaattactgattcagtcttattactcattgttggtctgttcaagttttctatttgttcctggtgaaatgtctacaaaaataacaaaaattagctgggtgtggtggcatgtgcatgtagtcccagctacttagggggctgaggcaggaggatcgcttgaacctcaggaggttaaggctgcagtgagctggtattgcgccactgtgttgcagcctgggtgacaaagtgagaccctatctcaaaaataaaaaaaattcatatggaaccacaaaagagccccatccaatagttaagctatagtaatagctttgtaactgttatagtagaaaccaaatcatcatggtaccggcctaaaacagacacatagaccaatggaaagaatagagaacccagaaataatttcatatacttacagccaactgactttcaacaaaggcaccaagaaaggacacccttttcaataaatggtgctgggaaaactggatatccatatgcagaagattgcagctaggctcatatctcttaccatattaaaaaatcaaccaaaaatggattaaaggcttaaatgatagatccgaaactatgaaactactaaaagagaatataggggaaatgctcaagaacattggtctaggcaaagattttatggttaagacatcaaaagcataggcaacaacaacaaaaaataggcaggtgggactatattaaactaaaaatctgcacagcaaagaaaacaacagagtgaagagaccaactgtagatgggaacaatattttcaaattatccaacaggggactaatatccagagtgtacaaggaacacaattcaacagtaaaaaaaaaaaaaaaa

SEQ ID NO: 22752 - DNA, 3122 bp, Homo Sapiens
cgctgcggccgctatcccctccggaccatggccgacgacgacgtgctgttcgaggatgtgtacgagctgtgcgaggtgatcggaaagggtcccttcagtgttgtacgacgatgtatcaacagagaaactgggcaacaatttgctgtaaaaattgttgatgtagccaagttcacatcaagtccagggttaagtacagaagatctaaagcgggaagccagtatctgtcatatgctgaaacatccacacattgtagagttattggagacatatagctcagatggaatgctttacatggttttcgaatttatggatggagcagatctgtgttttgaaatcgtaaagcgagctgacgctggttttgtgtacagtgaagctgtagccagccattatatgagacagatactggaagctctacgctactgccatgataataacataattcacagggatgtgaagccccactgtgttctccttgcctcaaaagaaaactcggcacctgttaaacttggaggctttggggtagctattcaattaggggagtctggacttgtagctggaggacgtgttggaacacctcattttatggcaccagaagtggtcaaaagagagccttacggaaagcctgtagacgtctgggggtgcggtgtgatcctttttatcctgctcagtggttgtttgcctttttacggaaccaaggaaagattgtttgaaggcattattaaaggaaaatataagatgaatccaaggcagtggagccatatctctgaaagtgccaaagacctagtacgtcgcatgctgatgctggatccagctgaaaggatcactgtttatgaagcactgaatcacccatggcttaaggagcgggatcgttacgcctacaagattcatcttccagaaacagtagagcagctgaggaaattcaatgcaaggaggaaactaaagggtgcagtactagccgctgtgtcaagtcacaaattcaactcattctatggggatccccctgaagagttaccagatttctccgaagaccctacctcctcagggcttctagcagcagaaagagcagtctcacaggtgctggacagcctggaagagattcatgcgcttacagactgcagtgaaaaggacctagattttctacacagtgttttccaggatcagcatcttcacacactactagatctgtatgacaaaattaacacaaagtcttcaccacaaatcaggaatcctccaagcgatgcagtacagagagccaaagaggtattggaagaaatttcatgttaccctgagaataacgacgcaaaggaactaaagcgtattttaacacaacctcatttcatggccttacttcagactcacgacgtagtggcacatgaagtttacagtgatgaagcattgagggtcacacctcctcccacctctccctatttaaacggcgattctccagaaagtgctaacggaggcatggatatggagaatgtgaccagagttcggctggtacagtttcaaaagaacacagatgaaccaatgggaatcactttaaaaatgaatgaactaaatcattgtattgttgcaagaattatgcatgggggcatgattcacaggcaaggtacacttcatgttggtgatgaaattcgagaaatcaatggcatcagtgtggctaaccaaacagtggaacaactgcaaaaaatgcttagggaaatgcgggggagtattaccttcaagattgtgccaagttaccgcactcagtcttcgtcctgtgagagagattccccttccacttccagacagtccccagctaatggtcatagcagcactaacaattctgtttcggacttgccatcaactacccaaccaaaaggacgacagatctatgtaagagcacaatttgaatatgatccagccaaggatgacctcatcccctgtaaagaagctggcattcgattcagagttggtgacatcatccagattattagtaaggatgatcataattggtggcagggtaaactggaaaactccaaaaatggaactgcaggtctcattccttcttctgaacttcaggaatggcgagtagcttgcattgccatggagaagaccaaacaggagcagcaggccagctgtacttggtttggcaagaaaaagaagcagtacaaagataaatatttggcaaagcacaatgcagatcttgtcacatatgaagaagtagtaaaactgccagcattcaagaggaaaacactagtcttattaggcgcacatggtgttgggagaagacacataaaaaacactctcatcacaaagcacccagaccggtttgcgtaccctattccacatacaaccagacctccaaagagagacgaagaaaatggaaagaattattactttgtatctcatgaccaaatgatgcaagacatctctaataacgagtacttggagtacggcagccacgaggatgcgatgtatgggacaaaactggagaccatccggaagatccacgagcaggggctgattgcaatactggacgtggagcctcaggcactgaaggtcctgagaactgcagagtttgctccttttgttgttttcattgctgcaccaactattactccaggtttaaatgaggatgaatctcttcagcgtctgcagaaggagtctgacatcttacagagaacatatgcacactacttcgatctcacaattatcaacaatgaaattgatgagacaatcagacatctggaggaagctgttgagctcgtgtgcacagccccacagtgggtccctgtctcctgggtctattaggcctctccccagatatctgagcataactgggagcacctcatttgtggaaaagcctctttgttatcggccttgtgtcagcaggtcatggtccctagagactacctagttgtagtgtgacctacatttataattattgtcatgtccgaatagataggaggagaaaaacaattacacactaatttaaagagacagtatcttttttaatcagttctcctaaactttaataaaatgtatctttaaatgtatgtattattcaatcctttggaatgttatatttttggaaatcatagctttttatttccaaggcccctaaaactgcacaaaataga

SEQ ID NO: 22753 - DNA, 5027 bp, Homo Sapiens
aaagcgacaccttctacgctgggtggccagtttccatgtggcttgrtgtgggagcagagacgggacagtggggcctgtccttgttcatccactccctgcctgtgctggttgcagcctcagagcaggcgggagatgttcttggggcttaggctcctggcagagcacatagcaggagtttgtggggtctgaggttcctgtcccagggttccccgattctgtgcctggcctattaatctttctcyggggagcccagtgcccactgccgagcaggctcctgccatcccccatgggcgggtgtgtctgaaggagaatgggatcccggcacggtcttggtttctaacatctcggggtgtgttttggaggcaggcgggagtcatggatgtagatgctgaaagagagaagataacacaggagatcaaggagctggaaaggattttggatcccggctcctcgggctcccacgtggagatctcagaatcaagtctcgagtcagattctgaagcagattcactgccttctgaggacttggatcctgccgatcccccgatctcggaagaagaaaggtggggcgaagccagcaatgacgaggacgatcccaaggataaaaccctccctgaagacccagaaacctgcctgcagctgaacatggtctaccaggaggtcatccaggagaagctggctgaggccaacctgctgctggcccagaaccgggagcagcaggaggaactcatgagggatctggctgggtccaaaggcaccaaggtgaaagacggcaaaagcctgcccccaagcacatacatggggcacttcatgaagccgtatttcaaggacaaggtcacgggcgtggggccacctgccaacgaggacacacgagagaaggctgcccaggggatcaaggctttcgaggagctccttgtgaccaaatggaaaaactgggaaaaggccttgctccgaaagtcagtggtgagtgaccgcctgcagcgattgcttcagcccaagttactgaagctcgagtacttgcaccagaagcagagcaaagtctccagtgagctggagaggcaagccctggagaagcagggcagggaagccgagaaggagatccaggacatcaaccagcttccagaagaggccttgctgggaaacaggctggacagccacgactgggagaagatttccaatattaactttgaaggcagccgcagtgcagaggagatccggaagttctggcagaactcggagcaccccagcatcaacaagcaggagtggagcagggaggaggaggagcggctgcaggcgatcgcggctgcacacggccacctggagtggcagaagattgcagaggagctggggaccagccgcagcgccttccagtgcctgcagaaattccagcagcacaacaaagctctgaaacgcaaggagtggacagaggaggaggaccgcatgctcacgcagctggtgcaggagatgcgcgtcggcagccacatcccctaccgcagaattgtctactatatggaagggagagactccatgcagctgatctaccgatggaccaagagcttggatcctggtctgaagaagggttactgggccccggaggaagatgctaagttgcttcaagctgttgccaaatacggggagcaggattggtttaaaatccgggaagaggtgccaggtaggagcgatgcccagtgccgagatcggtatctcaggagattacatttcagcttgaaaaagggtcggtggaatttaaaagaagaggaacagttaattgaattaatagaaaaatatggtgtcggtcactgggcaaaaatagcttctgagctgccccatcggtctggctcccagtgtctgagcaagtggaagatcatgatggggaagaagcagggtctccggaggcggcggcggagggcccgtcacagcgtccggtggagctctaccagcagcagcggcagcagcagtggcagcagtggagggagcagcagcagcagcagcagcagcagcgaggaggacgagccagagcaggcgcaggccggggagggtgacagagcgctgctgtccccacagtacatggtcccggacatggacctgtgggttcctgccaggcagagcaccagccagccatggagaggaggggcaggggcctggctgggaggccccgctgcctccctcagccctcccaaggggtccagtgccagccagggcggcagcaaggaagcttccaccacagccgcggctcctggagaggagacgagtccggtgcaggtccctgccagggcccacggccctgtcccgaggtctgcccaggcctcccactcagcagacactcgcccggcgggcgcagagaagcaggccctggagggtgggaggcgtctgctgacagtgcctgtggagaccgtgctgagggtgctcagggccaacacggctgctcggagctgcacacagaaagagcagctgaggcagccacccctgcccacctcatccccaggggtcagctctggtgacagcgtggcccgatcccatgtgcagtggctacggcacagagccacccagagtgggcagcggcgctggagacacgctctgcaccggaggctcctgaaccgcaggctgctgctggctgtgaccccttgggtaggggacgttgtcgtgccctgcacacaggcttcccagagacccgccgtagtgcagactcaagcggatggcctcagggagcagctgcagcaggcccgcctggccagcacccctgtgtttaccctgtttacccagctgttccacatcgatactgccggctgcttggaggtcgtccgagagaggaaggccctgccacccaggctgccccaggctggtgctcgggacccaccagttcatcttctgcaggcatcctcaagtgcccagagcaccccaggccacctcttcccaaacgtgccggctcaagaagcctcaaagagtgccagccacaaagggagccgaagactggcgtccagccgggtggagcgcaccctaccccaggcgtccctgctggcttcaaccggcccccggcccaagcccaagactgtgtcggagctgcttcaggagaagcggcttcaggaggcccgtgccagggaggccacccggggcccggtggtgctcccgtcccagctgctggtctcctcgtctgtgatcctccagccccctctaccacacaccccacacggccgcccagccccgggtcccaccgtcttaaatgtaccgctctctgggcctggggcccccgcagcagccaaacctggcacttctggctcctggcaggaggctgggacttcagccaaggacaagagactctccaccatgcaagccctgcccctcgctcctgtcttctcagaggccgaaggcacagcccctgctgcttcccaagcccctgccctgggccccggccagatctctgtgagctgccccgagagtggtctcggacagtctcaggcccccgctgcatcccggaagcagggcctgcctgaggcgccaccctttctccccggagcccccagccccaccccactgcccgtccagcccctcagcctgacgcacataggagggccacatgtggcgaccagtgtccccctgcctgtcacctgggtgctcacagcccaggggcttctccctgttcctgtaccagctgtggtgagccttcccaggccagcagggacccctggccccgcagggctgctggccactctgctgcctcccctgactgagactcgggcggcccagggccccagggccccagcgttgagcagctcttggcagcccccagccaatatgaacagggaaccggagccttcctgcaggacagacaccccagctcctcccacacacgccctctcccaaagtcctgcagaagcggatggcagtgtggcctttgtccctggagaggcccaggtggccagggagatacctgagcccaggacgtcctcccacgctgaccctcctgaagcagaacccccttggtccgggaggctgccagccttcggtggtgtcatcccagcaactgagccaagggggacgccggggtccccctcagggacacaggagcccagggggcctctgggcctggagaagctgcccctgcgccagcctgggcctgagaagggggccctggacctggagaagccgcccctaccccagcctgggcctgagaagggggccctggacctgggcctgctgtcccaggagggcgaggcagccacacagcagtggctggggggccagcggggggtgcgtgtgcctcttctgggcagcagactgccctatcagcccccagccctgtgcagcctgcgagctctgtccggtctcctactccacaagaaggccctggagcacaaggccacctccctggtggtggggggcgaggctgagcggccggccggagcactgcaagcctcactggggctggtgcgggggcagctccaggacaacccggcctacctcctgttgcgggcgcggttcctggcagccttcaccctccctgcgctcctggccaccctggccccccaaggcgtccgcaccaccctctcagtaccttcgagggtgggctctgagagtgaggatgaagacctcctgagtgagctggaacttgcagacagggacgggcagccgggctgcacgacagccacatgccccattcagggagccccagactctggtaaatgctctgcttcctcctgcctggatacttctaatgaccctgacgacctggacgtgctcagaacccggcatgccaggcacacccggaagcggaggcggctggtgtgagcagcaggacaagcactttctcagaagcccgtggccctgctgacgagagacagcccacccccagcctgcaagagaggcagccagaggccaggtatctgctggccgctgactgaccaggtccgcagtgaacagaggcgggcctgccgactgactgtgtggcatggagcatggctgttccccaagtgcacacctgaacacttggaggaataaagttctgtttttaattgtggaaaaaaaaaaaa

SEQ ID NO: 22754 - DNA, 2877 bp, Homo Sapiens
cggccggataggcgcgagggggccgcgtgaggcggtgccggcgttctggcccccaaagccggtctagcgcgccgggcgtcttccttacttccgctgccgccgccgccacatcccgggacccgacgggccgcggcgcggaggcctcggggcaaggtggggcgggcctcccgagctcccaggaccccgcgcgcttcgcccacaggcccggcgaagcccgacccgcgcggcgcccccagggccaggggaggagcctaaggacccggacgagcgccgctccagtaggtgacaagaggaaacaagaacctcagttcaggggaaacacagcaaggaaatgtgagccccaggctgcagaaggaagagtcagtgaatggctgcggtgtgacaacatgcaccaccagtggcttctgctggccgcatgcttttgggtgattttcatgttcatggtggctagcaagttcatcacgttgacctttaaagacccagatgtgtacagtgccaaacaggagtttctgttcctgacaaccatgccggaagtgaggaagttgccagaagagaagcacattcctgaggaactgaagccaactgggaaggagcttccagacagccagctcgttcagcccctggtctacatggagcgcctggaactcatcagaaacgtctgcagggatgatgccctgaagaatctctcgcacactcctgtctccaagtttgtcctggaccgaatatttgtctgtgacaagcacaagattcttttctgccagactcccaaagtgggcaacacccagtggaagaaagtgctgattgttctaaatggagcattttcttccattgaggagatccccgaaaacgtggtgcacgaccacgagaagaacggccttcctcggctctcttccttcagtgatgcagaaattcagaagcgattgaaaacatacttcaagttttttattgtaagagatcccttcgaaagacttatttctgcatttaaggataaatttgttcacaatccccggtttgagccttggtacaggcatgagattgctcctggcatcatcagaaaatacaggaggaaccggacagagacgcgggggatccagtttgaagatttcgtgcgctacctcggcgatccgaaccacagatggctagaccttcagtttggggaccacatcattcactgggtgacgtatgtagagctctgtgctccctgtgagataatgtacagtgtgattggacaccacgagaccctggaggacgatgccccatacatcttaaaagaggctggcattgaccacctggtgtcatacccgactatccctccgggcattaccgtgtataacagaaccaaggtggagcactatttcctgggcatcagcaaacgagacatccgacgcctgtatgcccgtttcgaaggggactttaagctctttgggtaccagaaaccagactttttgctaaactaatgcataagacctatgaattcaaatatctttattagacctggggctaaccaggtgaagatctgagcccagaaatgacccttcctccaccacacccctcctttgaggatgcccggggtctcccacaggcctgtgagttgcctcggcatatgacgcagaaccccaactgttacaacttagtttggatgtaagatgctctgaggaccctgcccacacccctgcgtgcattaggatgtcgctggcctttgctcacctcagaggggagaaaaggctaaagatttgcagtttgacagcccagcagggaggaagcatcacacagcgttaggagccgtttccttcaggtgttaaggaaggggatgcccctgaggttctcctggctagtcggggtggcttcacccatcactggtgggttgcaggaacagcacccaggactctgaggagggacagagaagcaagggggctgctgaaatcgcagagacttttgcagcatcagatctgaggagtaaaacggcacctctggccttcatcttggtgctgcgacaattgtggaggcaaagcattctttctgtgactattttgttcctgtagacagtcagcgatggccagagggtggtgtggtgtccaggggtccatctttccagaatccatgcctgtgtaatgctggtccatgcttctgaacctgtgtctgccaagcgcctatttcattcagcacaagacatacgattttagaaggtgaggggaggggaggctttttctacctgagaaggggagtgtctttgagggccttaaaaggaccatggcccaggaatgggggcgctggttgggcttggagctcaggctgctgtggatcccggcgcatcagttctgacttgccttacctgggtggacagcagtgaatctccacctgtcttctccagggagctcccatgttggggctgaagacgagcaggggcaacctgccagcatcacagaattcagtgtagtttatacatttcgattcctttcatctcagcaaaatgggcactgccagagccatttctgatcacaccaccatcctggaccatgtgactggaaggtgggtaaccaagttcaccagcaataaaacccagcgcccaggtagcctccagcagtgcggcttcctggcaacaaggtaggccctggtgcagggcaagccgcagcgaccatttcagataccgtccacagccaggaccgctgagaactgggacagtttcctgggatgagtgccagcctgagcctgcatggtgccgccgagcccggggtggaggagggagccaggcttcgcttcaaggcggcctctaccttttctcagaatggtttcctgattgtgtcaatgtgaaagttaaataaaatttatgtgccaaaaaaaaaaaaaaaaaaaaaaaaaaaaaaaaaaaaaaaaaaa

SEQ ID NO: 22755 - DNA, 3013 bp, Homo Sapiens
cgctcgtatcaggcttcatggcggcgcggccactgtcccggatgctgcggcggcttctgaggtccagcgcccggagctgcagctcaggggctccggtgacccagccctgccccggggagtccgcgcgagctgcctcggaggaggtgtccaggcggaggcagttcctgcgggagcatgcggcccccttctccgccttcctcacagacagcttcggccggcagcacagctacctgcggatctccctcacagagaagtgcaacctcagatgtcagtactgcatgcccgaggagggggtcccgctgacccccaaagccaacctgctgaccacagaggagatcctgaccctcgcccggctctttgtgaaggaaggcatcgacaagatccggctcacaggtggagagccgcttatccggccggacgtggtggacattgtggcccagctccagcggctggaagggctgagaaccataggtgttaccaccaatggcatcaacctggcccggctactgccccagcttcagaaggctggtctcagtgccatcaacatcagcctggacaccctggtgcctgccaagtttgagttcattgtccgcaggaaaggcttccacaaggtcatggagggcatccacaaggccatcgagctgggctacaaccctgtgaaggtgaactgtgtggtgatgcgaggccttaacgaggatgaactcctggactttgcggccttgactgagggccaccccctggatgtgcgcttcatagagtatatgccctttgatggcaacaagtggaacttcaagaagatggtcagctataaggagatgctagacactgtccggcagcagtggccagagctggagaaggtgccagaggaggaatccagcacagccaaggcctttaaaatccctggcttccaaggccagatcagcttcatcacatccatgtctgagcatttctgtgggacctgcaaccgcctgcgaatcacagctgatgggaacctcaaggtctgcctctttggaaactctgaggtatccctgcgggatcacctgcgagctggggcctctgagcaggagctgctgagaatcattggggctgctgtgggcaggaagaagcggcagcatgcaggcatgttcagtatttcccagatgaagaaccggcccatgatcctcatcggtgggtgacccatcaagttatttttgatgttccccaattccccaccagccaatccaagcattttctcctgggacccgctccatgttcagggtctaagacccagaatgagtttctccagccaggtggccactttatggaaaggatgcagggtcccccagacccctcctctagcccagcagcggctggggtctggctcctttcagagacactacacttcccgtgcagactcagatgccaactcaaagtgccttagcccaggttcctgggcttctgctgccccctcaggaccccagctaacctcagaacaactaactcatgtggactcggaaggacgggcagctatggtagatgtgggcaggaagccagacacagagcgggtggctgtggcttcagccgtggtcctcctgggaccggtagccttcaagcttgtccagcagaaccagctcaagaaaggagatgccctagtggtggcccagctggctggagtccaggcagccaaggtgaccagccagctgatccctctgtgccaccacgtggccctgagccacatccaggtgcagctggagctggacagcacacgccatgccgtgaagatccaggcatcttgccgggctcggggccccaccggggtggagatggaggccctgacctctgctgcagtggccgccctcaccctgtatgacatgtgcaaggctgtcagcagggacatcgtgttggaggagatcaagctcattagcaagactggtggtcagcggggggacttccatcgggcttagcacctgcccttctcacccatggcccacccaggcctggagctgggatgcaatgtaggctgagggaaagacgtcaggttcctttaatcacagtcactgtttgtttaccttgagcagtaaacccgaagtcagcctgctctactactaacaaacaggcctgctgctagatgatctctaatgaccaatggggcttcctttctatagggaggataccagcaggcccttaagccttccaggacactaaggtcgtgggagcgggactgcaacaagcaatgccagataactgagaaatcatgttctttgtggactatttcagacaaccaggttccgacagtccagcccagaacttttccttctcattttgggttttctcttctcctgctttcctggggagagattaagcgctcattaagcagaggagcccactttgaggagagcaaagcacaagcttgcttgaagaatggatcccaacttctccccggcagctctgcctccctaagtctgtgaagccgcagccctgccctgtcctgtcctgtcctgacttcatctctccttctgcccaagtctgtgtcccatcagacttgcagcctttcagcttaacagttgcccggtcctgctggccccttttcctctggcccccctcttctgaaacaggatgtgcacacatgggccatagccctaaggactcctgccagaccacacagcccacacctggccctgttcacggctgttccacccacccctctttattctggagcatatcagggaaagaaaagttgatgatagattgccttcaccctcacagcgcacaaataaagctacgatgccaactttgcagatgcaagaatgaagacactgtgtgggtagggcactgagctgctgcagtttcacagggaaggctgcacctatcaatcaatcaatcaatcctatcccaagacacagttccctgagggaagaagaggagggacctggaaaggcctaagggtgtactctctgtatagccccgctatgggaaaataaagtggagtagggggcatagaaaaaaaaaaaaaaaaaaaaaaaaaaaaaaaaaa

SEQ ID NO: 22756 - DNA, 11344 bp, Homo Sapiens
  misc_feature (11316)..(11316): n is a, c, g, or t
ctcttacctgccaacctgggaggttgatgatgaacatgtctttaccttttctttggagtttgcttaccttattaatatttgctgaagtaaatggcgaacgtggagaacttgagctgcagagacaaaaaagaagcatcaatctccaacagcctcgaatggctacagagagaggaaatttggtgtttcttacggggtctgctcaaaacattgagtttagaaccggatccctgggaaaaattaaattaaatgatgaagatctcagtgagtgtttacatcagatccagaaaaacaaagaagatattatagagttaaaagggagcgcaattggtctgcctcaaaatatatctagtcaaatctatcagcttaattccaagctggtggatcttgagagaaaattccaaggcttgcagcagactgttgacaaaaaggtttgcagcagcaatccttgccagaatggtgggaactgcctcaatctgcatgattcctttttttgtatctgtcccccacagtggaagggtcctctctgctcagctgatgttaacgaatgtgagatttactcaggaacacccttgagctgccagaatggaggcacatgtgttaatacaatgggaagttacagttgtcactgcccacctgagacgtacggaccccagtgtgcatccaaatatgacgactgtgaagggggttctgtggcacgctgtgtccatggcatctgtgaggatttaatgcgagagcaagctggagagcccaagtacagctgcgtctgtgatgctgggtggatgtcttcacccaacagccctgcctgcacgctggacagagacgagtgcagcttccagcccgggccttgctccacacttgtgcagtgtttcaacactcaaggctctttctactgtggggcctgtccaacaggctggcaaggcaatggatatatttgcgaagatatcaatgaatgtgagataaataatggcggctgttctgtggctccacccgttgagtgtgtgaatacacctgggtcttcccactgccaggcctgtccaccagggtaccagggtgacggaagagtgtgcacactcacagacatctgctcagtcagtaatggaggctgccacccagatgcctcatgctcctcaactctaggttccttacctctctgcacgtgtctcccgggttatactggaaatggttatgggccaaatggatgtgtgcagctcagtaatatttgcctaagtcacccctgtctaaatggacaatgcatcgacactgtctctggttatttttgtaagtgtgactcaggttggacaggtgtcaactgtacagaaaacatcaatgagtgtttgagcaacccctgtttgaatggaggaacttgtgttgatggcgttgattctttcagttgtgaatgcacacgtctctggactggagctctctgtcaggttcctcagcaagtttgtggagagtccctctcaggaataaatggaagcttcagctacaggagcccggatgttggttatgttcatgatgttaactgcttctgggttatcaaaactgaaatgggaaaggtcctgcgtatcactttcacttttttccggttagaatccatggacaactgtccacacgagtttcttcaggtttatgatggagattcctcttctgcttttcaacttggaagattttgtggctccagcctccctcatgaactcctcagcagtgacaatgctctctattttcatctctattctgaacatttaagaaatgggagaggctttacagtaagatgggaaacacagcaaccagagtgtggaggtatcctgactggtccttacggttctattaagtctccggggtatcctggaaactatcccccaggaagagattgtgtctggattgttgtaactagtcctgacctcctggtaacatttacttttgggaccttgagcctcgagcaccatgatgactgcaacaaagattaccttgagattcgagatggtcctttgtatcaggacccccttcttgggaagttctgcaccactttctctgtcccaccgctccagactactggcccctttgccagaattcacttccattcagactcccagattagtgaccaaggcttccatatcacctacttaacatcaccttcggatctgcgttgtggtgggaactacacggacccagagggtgaactcttcttgcctgagttgtctgggcctttcactcacaccaggcaatgcgtctatatgatgaagcagccccagggagaacaaatacaaatcaacttcacccacgtggagctgcaatgccagagtgacagttctcagaattacattgaggttcgagatggtgaaaccttacttggaaaagtctgtggcaacggaaccatctctcacattaaatccattactaatagtgtctggatcaggtttaaaatagatgcttctgttgaaaaagctagtttcagagctgtttatcaagtcgcttgcggggatgaattaactggagaaggggtcattcgctcgcctttttttcctaacgtgtatcctggagaaagaacctgtaggtggaccatccaccagccccaaagccaagtcattctcctcaacttcactgtctttgaaattggaagttctgcccactgtgaaacagattatgttgagattggtagcagttccattttgggttctcctgaaaataaaaagtattgcggtacagacataccttcatttataacatctgtgtacaattttctttatgtcacattcgtgaaaagttcttctactgaaaaccatggtttcatggctaagttcagtgctgaggatttggcatgtggagaaattcttacagaatcaacagggaccattcaaagtcctggccatccaaatgtctacccccacggtatcaactgtacttggcatatattagtccaacctaatcacctgattcatttaatgttcgaaacatttcatctggagtttcattacaattgcacaaacgactacttggaagtttatgacaccgactctgagacatcccttggaagatactgtggaaagtcgatcccgccatctctcacaagcagtggtaactcattgatgctggtgtttgtgactgactccgacctcgcttatgaaggcttcttaataaactatgaagcaatcagtgcagcaacagcatgtttgcaagactacacagatgatttggggacattcacttctccaaacttccccaataattatcccaacaactgggaatgcatttatcggatcacagtgagaactggccaactgattgcagtgcacttcacaaacttctccttggaggaagccattggaaactattatacagattttctggaaatcagagatggaggctatgaaaaatcaccattgctgggaatattctatggctcaaatctacccccaacaatcatctctcatagtaacaaactatggttaaaatttaagagtgaccaaatagacacaaggtctggattctcagcttactgggatgggtcatcaacaggttgcgggggtaatctcaccacttcaagcggtacgttcatatctcccaactacccgatgccctattaccacagctctgaatgctactggtggttgaaatctagccacggcagcgcatttgaactggaattcaaagactttcacttggagcatcatccaaactgcactttagattacctggctgtatatgatggcccaagtagcaactctcatctgctaactcagctttgtggggatgagaaaccccctcttattcgttctagtggagacagcatgtttataaaactgaggacagatgaaggtcagcaaggacgtggcttcaaggctgaataccggcagacatgtgagaatgtggtaatagtcaatcaaacctatggcatcttagagagtatagggtatccgaatccttattctgaaaatcagcattgcaactggaccatccgggcaacaacaggcaacactgtgaactacacatttttagcatttgacttggaacatcacataaactgctccacagattatttagagctctatgatggaccacggcagatgggacgctactgtggagtagacctgccccctccagggagtactacaagctccaagcttcaagtgctgctccttacagatggggttggccgccgtgagaaaggatttcagatgcagtggtttgtttacggttgtggtggagagctgtctggggccacaggctccttcagcagccccgggttccccaacaggtatccaccaaacaaggagtgtatctggtacattaggacggaccccgggagtagcattcagctcaccatccatgacttcgatgtggagtatcattcaaggtgcaactttgatgtcttggagatctatggaggccccgatttccactctcccagaatagcccaactgtgtacccagagatcacctgagaaccccatgcaggtctccagcactggaaatgagctagcaattcgattcaagaccgacttgtccataaatgggagaggcttcaatgcgtcatggcaagcagtcactggaggttgtggtgggattttccaggctcccagtggagagattcattctccaaattaccccagtccttataggagcaacacagactgttcttgggtcattcgggttgacagatatcatcgtgttctcttgaacttcactgactttgatcttgaaccacaagactcttgtattatggcatacgatggcttaagctccacaatgtcccgccttgccaggacgtgtggaagggagcagctggctaaccccatcgtctcctcaggaaacagcctcttcttgagatttcagtctggcccttccagacagaacagaggcttccgagctcaattcaggcaagcctgcggaggccacatcctcaccagctcatttgatactgtttcctctccacggttccctgccaattatccaaacaatcagaactgcagctggatcattcaagcgcaacctccattaaatcatatcaccctctcttttacccactttgaacttgaaagaagcacaacgtgtgcacgtgactttgtagaaattttggatggcggccacgaagacgcgcccctccgaggccgttactgtggcaccgacatgccccatcctatcacatccttcagcagcgccctgacgctgagattcgtctctgattctagcatcagtgctgggggtttccacaccacggtcaccgcatcagtgtcggcttgtggtggaacgttctacatggctgaaggcatcttcaacagccctggctacccagacatttatccccctaatgtggaatgtgtctggaacatcatcagttcccctggcaaccggctccagctgtcttttatatctttccagttggaagactctcaggactgcagcagagattttgtggagatccgtgaaggaaatgccacgggtcacttggtgggacgatactgtggaaactccttccctctcaattattcttccatcgttggacataccctgtgggtcagatttatctcagatggttctggcagcggcacgggcttccaggccacatttatgaagatatttggcaatgataatattgtgggaactcatgggaaagtcgcctctcctttctggcctgaaaactacccacataactccaattaccaatggacagtaaatgtgaatgcatctcacgttgtccatggtagaatcttggagatggacatagaagaaatacaaaactgctattatgacaaattaaggatctatgatgggcctagcattcacgcccgcctaattggagcttactgtggtacccagactgaatctttcagctccactggaaattctttgacatttcatttttactccgactcttcaatctcggggaagggattccttctggagtggtttgcagtggatgcacctgatggtgttttacctaccattgctccaggtgcttgtggtggcttcctgaggacgggagatgcacccgtgtttctcttctccccgggctggcctgacagttacagtaatagagtggactgtacgtggctcatccaggctcccgactctaccgtggaactcaacattctttccctggacattgaatctcaccgaacgtgtgcctatgatagccttgtgatacgagatggagataataacttggcccagcagctagcagttctctgtggcagagagatccctgggcccatccggtctactggagagtacatgttcatccgcttcacctcggactccagtgtaaccagggcaggcttcaatgcatcctttcacaagagctgcggtggatatttgcatgcagacagagggatcatcacgtcccccaagtatccagagacttacccatccaacctcaactgttcttggcacgtcctggtccaaagtggcctgaccattgctgtccattttgaacagcctttccagattccaaatggagattcttcttgcaaccagggggattacttggtgctaagaaatggtcctgatatctattctccacccttgggaccccctggaggaaatggtcatttttgtggcagtcatgcttcatcaactctgttcacctcggataatcaaatgtttgttcagtttatttctgatcacagtaatgaagggcaaggatttaaaatcaaatatgaggcaaagagtttagcctgtgggggcaacgtctacatccatgatgctgattctgctgggtatgtgacctcccccaaccaccctcataattatcccccgcacgctgattgcatttggatcttagcggctccaccggaaacacgcatacagctgcaatttgaagatcgattcgatattgaagtaacacccaactgtacttccaactaccttgagttgcgggatggagtggattcggatgcaccaatactttccaaattttgtgggacatctttgcccagcagtcagtggtcctcaggagaggttatgtatttgagatttcgatctgacaacagccccacacatgtgggattcaaggccaagtattctatagctcagtgtgggggaagagtaccagggcaaagtggtgttgttgaaagcattggacatccaacacttccatacagagacaacttattctgtgagtggcatctccaggggctctctggacactatctcaccatctcttttgaagactttaaccttcagaattcttctggctgtgaaaaagacttcgtggagatctgggacaatcatacctctggaaacatcttgggcagatactgtggaaacaccattcctgacagcatagacacttctagcaatactgctgtggtcaggtttgtcacagacggctctgtgactgcctcaggattcagactgcgatttgaatccagtatggaagagtgtggtggggatcttcagggctctattggaacatttacttctcccaactacccgaacccaaatcctcatggccggatctgcgagtggagaatcactgccccggagggaaggcggatcaccctaatgtttaacaacctgaggctggccacgcatccgtcctgcaacaatgagcatgtgatagtattcaatggcattagaagtaactcaccccagctagagaaactgtgtagtagtgtgaatgtaagcaatgagattaaatcttcaggaaacacaatgaaagtcatttttttcacggatggatccaggccatatggcggcttcactgcttcctatacctccagtgaagatgcagtgtgtggtgggtctcttccaaatactcctgaaggaaactttacttctcctggctatgacggagtcaggaattactcaagaaacctgaactgcgaatggactctcagcaatccaaatcagggaaattcatccatttccattcactttgaagatttttacctagaaagtcaccaagactgtcaatttgatgtcctcgagtttcgagtgggtgatgctgatgggcccctgatgtggagactttgtggtccttcaaagcctacattgccattggttataccttattctcaggtatggattcactttgtcaccaacgaacgtgtagaacacattggattccatgcaaagtattcctttacagattgtggcggaatacagataggtgacagtggagtgatcacaagccccaactatccaaatgcttatgacagcctgacccactgctcttggctgttggaggccccacaagggcacaccatcactctcacatttagtgactttgatattgaaccccatacaacttgtgcttgggactctgtcactgtcaggaatggtgggtcccctgaatcacccatcataggacaatactgtggaaattcaaaccccaggacaatacagtcaggttccaatcagctggtcgtgacttttaactcagaccattcattgcaaggtggtggattttatgctacgtggaacacacaaactttaggttgtggtggaatatttcattctgataatggtacaatcagatcccctcactggcctcagaattttcccgaaaacagcagatgttcctggacggccattactcacaaaagtaaacacttggagatcagctttgacaacaacttcctaatccccagcggtgatggacaatgtcagaatagcttcgtgaaggtgtgggcaggaactgaggaggtggacaaagccctgctagccactggctgtgggaacgtggctccgggtcccgttatcacaccaagtaacacattcactgccgtcttccagtctcaggaggcaccagctcagggcttctccgcgtcctttgttagccgatgtggaagtaatttcactggcccttcaggttacatcatttctccaaattacccaaaacaatatgacaacaacatgaattgcacctatgtcatagaggctaatcctctgtcagtggtcctcttgacttttgtgtccttccacttagaagctcgttccgctgtgacgggaagctgtgtcaacgatggcgtgcacattatcagaggttacagcgtcatgtccaccccatttgctactgtgtgtggggatgagatgccagctcccctcaccatcgctgggccggttctgcttaacttctactccaacgagcaaatcacagacttcggattcaagttttcctataggataatctcctgtggtggtgtgttcaatttctcttctggaatcatcacaagtcctgcctattcatacgcagactacccaaatgatatgcactgtctgtataccatcaccgttagtgacgacaaggtgatcgagctcaagttcagtgattttgatgtggttccctccacctcctgctcccatgactacctggcaatttacgatggtgccaataccagcgatccccttcttggcaaattctgcggttccaagcgcccaccaaatgtgaagagcagcaataatagtatgctcctggtgttcaagacagattcatttcagacagcaaaaggctggaagatgtctttccggcagacattggggcctcagcaaggatgtggtggttatctgacaggctcgaataatacctttgcctctcctgattctgattcgaatggaatgtatgacaagaatttaaactgtgtatggatcataattgcacctgtaaacaaagtaattcacctcaccttcaatacatttgctctggaggcagcaagtactaggcaaagatgcctttatgattatgtaaagttatatgatggggatagtgaaaatgcgaacttggctggaacgttttgtggttccacagtacctgctccttttatctcttctggtaacttccttacggttcaattcatcagtgacttaacattagagagggaaggatttaatgctacatacaccatcatggacatgccttgtggtggaacgtacaatgcaacttggaccccacaaaatatttcatcacccaattcatcagacccagatgtcccattttccatctgtacttgggtcattgattcccctccgcatcagcaggtcaagataactgtgtgggcattacagctgacctcgcaagactgcacgcagaattacttacagcttcaggactcaccgcagggtcacggaaattcaagatttcagttctgtggcagaaatgcttcggctgtgccagtgttttattcttctatgagtactgcaatggtcattttcaaatctggagttgtaaacagaaactctagaatgagtttcacctatcagattgcagattgcaacagagactatcacaaggcatttggcaacctgagaagccctggatggccagataactacgacaatgacaaggattgcaccgttactctcacagccccccagaaccacaccatttccctcttttttcattcacttggcatcgagaactcagttgaatgcagaaacgatttcttggaggtgagaaatggaagtaacagcaattcaccattactgggcaagtactgtggaactctgctgccaaaccctgtcttctctcaaaataatgaactatacctacgatttaagagtgatagtgtaacttctgatcgtggatatgaaatcatctggacttcatcaccctctggatgtggtggaactctttatggagacagaggctcattcaccagccccggctatccaggcacatacccaaacaacacgtactgcgagtgggtccttgttgctcctgctggaaggcttgtcaccatcaacttctacttcatcagcattgacgatccaggagactgtgtccagaactatctcacactctatgatgggcccaacgccagctctccatcctctggaccatactgcggaggcgacaccagcatagctcccttcgtggcttcctcaaatcaggtcttcataaaatttcatgctgattatgcacggcgtccatccgcattccgattaacttgggacagctaagtgggtaacaactcgtgttcactcagcactttccctctgcagcacgctggacagcactctgccatcctgatacatgacccctgctgatgccacagagaataagctgaacttgtatggtttttcaccaaaccatggatagaatcaatatttgtaggccaggcgtggtggctcacccccctgtattctcagcactttgggaggccgaggcaggttgatcacctgaggtcaggagtttgagactagcctggccagcatggtgaaacctcatccctctaacaatataataattagccaggcgtggtggtgggtgcctgtaattccagccactcgagaagctgaggcaggagaattgcttgaacccaggaggcagaggttgcagtgagctaagatcacaccactacactccagcctgggcgandddgtaagactccatctcaaaaaaaaaa

SEQ ID NO: 22757 - DNA, 4028 bp, Homo Sapiens
gaattccggctcgtgtgctgcgagctggcggccgggccggagtgctggggctttgaactccgagaggaggtggaccagaacttttggaactagtgccggcggctctccaccccccagtataaaagaacgtgtggatcactttgctgagtacatccaagatttgaagaactgaaataaatcagctttaaacctgctttttaaaaatatctgggttggaatttgcccctgacaaataataaaatgatgagtgatgcaagtgacatgttggctgcagcgttggagcagatggatggtatcatagcaggttctaaggctctggaatattccaatgggatttttgattgccaatctcccacctctccattcatgggaagtttgcgagctctgcaccttgtggaagacctgcgtggattgttagagatgatggaaacagatgagaaagaaggcttgagatgccagatcccagattcaacagcagaaacgcttgttgaatggcttcagagtcaaatgacaaatggacacctaccagggaacggagatgtgtatcaagaaaggctggcacgtttagaaaatgataaagaatccctcgttcttcaggtaagtgtgttaacagaccaggtggaggctcagggagagaagattcgagatttggagttttgtcttgaagagcacagagagaagttgaatgccacagaagaaatgctgcagcaggagcttctaagtaggacatccttagaaactcagaagttggatctgatggctgaaatatctaacttgaagttgaaactgacagctgtagagaaggacagattggattatgaagataagttcagagacacagaggggctgattcaggagatcaatgatttgaggttaaaagttagtgaaatggacagtgagagacttcagtatgaaaaaaagcttaaatcaaccaaagatgaactggcatctttaaaagaacaactagaagaaaaggaatctgaagtaaaaaggctacaagaaaaattggtttgcaagatgaaaggagaaggggttgaaattgttgatagagatgaaaattttaaaaagaagctcaaagaaaaaaacatcgaagtacaaaaaatgaaaaaagctgtggagtccttgatggcagcaaatgaagaaaaggatcggaaaatagaagatcttcgacagtgcctgaacaggtacaagaaaatgcaagacacggtggtactggcccaaggtaaaaaaggcaaagatggagaatatgaagagctgctcaattccagttccatctcctctttgctggatgcacagggtttcagtgatctggagaaaagtccatcacccactccagtaatgggatctcccagttgtgacccatttaacacaagtgttcccgaagagttccatactaccatcttgcaagtttccatcccttcattattgccagcaactgtaagcatggaaacttctgaaaaatcaaagttgactcctaagccagagacttcatttgaagaaaatgatggaaacataatccttggtgccactgttgatacccaactgcgtgataaacttttaacttcaagtctgcagaagtccagcagcctgggcaatctgaagaaagagacatctgatggggaaaaggaaactattcagaagacttcagaggacagagctccggcagaaagcaggccatttgggacccttcctcccaggcccccagggcaggacacctccatggatgacaaccccttcggcactcgaaaagtcagatcttcctttggccggggcttttttaaaatcaaaagtaacaagagaacagcaagtgcaccaaacttagatcgtaaacgaagtgccagtgcacccaccctagctgaaacagaaaaagagacagcagcgcacctagatctggctggtgcttcttctcggccaaaagattcacagaggaacagtcccttccagataccgcctccatctccagattccaaaaagaaatccagaggtatcatgaaactctttggaaaacttaggagaagtcaatcaactacattcaacccagatgacatgtctgagcctgaattcaaaagaggagggacaagggcaaccgcggggccccgattaggttggtctcgagacttgggacagtctaacagtgacttggatatgccatttgccaagtggaccaaggagcaggtttgcaattggctgatggaacagggcttgggctcgtacctgaattctggcaagcactggattgcatctggccaaacgcttttgcaggcttctcaacaagatctagagaaggaacttggaatcaagcattcacttcatcgaaagaaactccagctagcactccaagccctgggatctgaagaagaaaccaatcatgggaagctggatttcaactgggtcactagatggttggatgacattggcctccctcaatataagacccagtttgatgaaggacgggttgatggtcgaatgctacattacatgactgttgatgacttactgtctctgaaggttgtaagtgtgctacaccatctcagtatcaaaagggccatccaggtcctgaggatcaataactttgaaccaaactgtctacggaggcggccatctgatgagaataccatcgccccatcagaagttcagaagtggactaaccatcgagtgatggagtggctgcgctccgtggacttggcagaatatgcgcccaatctcagaggcagtggtgtccatggtgggctcatggttctagagcctcgttttaacgtagaaacaatggctcagttattgaacatcccacccaataagactttgctgcgaagacatttggccactcatttcaaccttctgattggggctgaggcacagcaccagaagcgagatgccatggagctgccggattatgtacttctaacagctactgccaaagtgaagccaaagaaacttgcctttagcaattttgggaatttgagaaagaagaaacaggaagatggtgaagaatatgtttgtccaatggaattgggacaggcatcaggaagtgcatctaagaaaggatttaaacctggtttggatatgcgcctgtatgaggaagatgatttggaccggttagagcagatggaagattcagaagggacagtgagacagataggtgcattctctgaaggcatcaacaatctgacgcacatgttaaaagaagatgacatgtttaaagattttgctgcccgttcccccagtgccagcattacagatgaagactcaaacgtttgaccgtagcacctggatgaacattaggagtgcttagtcttttttctacttgcttttccaaacactcacagtatatacaacaggcagcggattgtctattgtttgttgttctaacttctgctgtcgagaagtttaaacagaaagcaggagtaatgtgccgattctgaagttgccacaaaaaataagacactggtgaatgagagtataattgtttttcttctatttaatgtaaaaatctgtgatatattatatttaaagtgttgcatttaagatgagtattttaccagagtgtttccattcatatccgcggtatggaggatttgaggaacagtaaccaggatgtgaatgattttgttacatcagtgttcactgtagccacctaagtaggacattatatgatttcagaatcaatatgtggaacttctttaagcattcagtgtgcccactaaatgccagccacacctccacttgcctcttattgtcttatttttatatatttttctaaatatatgtatatatacagtacatagaaaatagaacttttattttgtgacctaaggacgatggtgaaaagatcacgttttcaaaacaatctggtgatcagaatgttcatataccagctggtttctgaagaggtcagaatgatctttctccatactgacttttaacaatgttgatcattgaggctaaattaatatatatgaaatattcctttttgatgacaccacaaaattgttgaacagtttaagaatttcaaccttaatcttggatcc

SEQ ID NO: 22758 - DNA, 5830 bp, Homo Sapiens
actgagtcccgggaccccgggagagcggtcagtgtgtggtcgctgcgtttcctctgcctgcgccgggcatcacttgcgcgccgcagaaagtccgtctggcagcctggatatcctctcctaccggcacccgcagacgcccctgcagccgccggtcggcgcccgggctccctagccctgtgcgctcaactgtcctgcgctgcggggtgccgcgagttccacctccgcgcctccttctctagacaggcgctgggagaaagaaccggctcccgagttctgggcatttcgcccggctcgaggtgcaggatgcagagcaaggtgctgctggccgtcgccctgtggctctgcgtggagacccgggccgcctctgtgggtttgcctagtgtttctcttgatctgcccaggctcagcatacaaaaagacatacttacaattaaggctaatacaactcttcaaattacttgcaggggacagagggacttggactggctttggcccaataatcagagtggcagtgagcaaagggtggaggtgactgagtgcagcgatggcctcttctgtaagacactcacaattccaaaagtgatcggaaatgacactggagcctacaagtgcttctaccgggaaactgacttggcctcggtcatttatgtctatgttcaagattacagatctccatttattgcttctgttagtgaccaacatggagtcgtgtacattactgagaacaaaaacaaaactgtggtgattccatgtctcgggtccatttcaaatctcaacgtgtcactttgtgcaagatacccagaaaagagatttgttcctgatggtaacagaatttcctgggacagcaagaagggctttactattcccagctacatgatcagctatgctggcatggtcttctgtgaagcaaaaattaatgatgaaagttaccagtctattatgtacatagttgtcgttgtagggtataggatttatgatgtggttctgagtccgtctcatggaattgaactatctgttggagaaaagcttgtcttaaattgtacagcaagaactgaactaaatgtggggattgacttcaactgggaatacccttcttcgaagcatcagcataagaaacttgtaaaccgagacctaaaaacccagtctgggagtgagatgaagaaatttttgagcaccttaactatagatggtgtaacccggagtgaccaaggattgtacacctgtgcagcatccagtgggctgatgaccaagaagaacagcacatttgtcagggtccatgaaaaaccttttgttgcttttggaagtggcatggaatctctggtggaagccacggtgggggagcgtgtcagaatccctgcgaagtaccttggttacccacccccagaaataaaatggtataaaaatggaataccccttgagtccaatcacacaattaaagcggggcatgtactgacgattatggaagtgagtgaaagagacacaggaaattacactgtcatccttaccaatcccatttcaaaggagaagcagagccatgtggtctctctggttgtgtatgtcccaccccagattggtgagaaatctctaatctctcctgtggattcctaccagtacggcaccactcaaacgctgacatgtacggtctatgccattcctcccccgcatcacatccactggtattggcagttggaggaagagtgcgccaacgagcccagccaagctgtctcagtgacaaacccatacccttgtgaagaatggagaagtgtggaggacttccagggaggaaataaaattgaagttaataaaaatcaatttgctctaattgaaggaaaaaacaaaactgtaagtacccttgttatccaagcggcaaatgtgtcagctttgtacaaatgtgaagcggtcaacaaagtcgggagaggagagagggtgatctccttccacgtgaccaggggtcctgaaattactttgcaacctgacatgcagcccactgagcaggagagcgtgtctttgtggtgcactgcagacagatctacgtttgagaacctcacatggtacaagcttggcccacagcctctgccaatccatgtgggagagttgcccacacctgtttgcaagaacttggatactctttggaaattgaatgccaccatgttctctaatagcacaaatgacattttgatcatggagcttaagaatgcatccttgcaggaccaaggagactatgtctgccttgctcaagacaggaagaccaagaaaagacattgcgtggtcaggcagctcacagtcctagagcgtgtggcacccacgatcacaggaaacctggagaatcagacgacaagtattggggaaagcatcgaagtctcatgcacggcatctgggaatccccctccacagatcatgtggtttaaagataatgagacccttgtagaagactcaggcattgtattgaaggatgggaaccggaacctcactatccgcagagtgaggaaggaggacgaaggcctctacacctgccaggcatgcagtgttcttggctgtgcaaaagtggaggcatttttcataatagaaggtgcccaggaaaagacgaacttggaaatcattattctagtaggcacggcggtgattgccatgttcttctggctacttcttgtcatcatcctacggaccgttaagcgggccaatggaggggaactgaagacaggctacttgtccatcgtcatggatccagatgaactcccattggatgaacattgtgaacgactgccttatgatgccagcaaatgggaattccccagagaccggctgaagctaggtaagcctcttggccgtggtgcctttggccaagtgattgaagcagatgcctttggaattgacaagacagcaacttgcaggacagtagcagtcaaaatgttgaaagaaggagcaacacacagtgagcatcgagctctcatgtctgaactcaagatcctcattcatattggtcaccatctcaatgtggtcaaccttctaggtgcctgtaccaagccaggagggccactcatggtgattgtggaattctgcaaatttggaaacctgtccacttacctgaggagcaagagaaatgaatttgtcccctacaagaccaaaggggcacgattccgtcaagggaaagactacgttggagcaatccctgtggatctgaaacggcgcttggacagcatcaccagtagccagagctcagccagctctggatttgtggaggagaagtccctcagtgatgtagaagaagaggaagctcctgaagatctgtataaggacttcctgaccttggagcatctcatctgttacagcttccaagtggctaagggcatggagttcttggcatcgcgaaagtgtatccacagggacctggcggcacgaaatatcctcttatcggagaagaacgtggttaaaatctgtgactttggcttggcccgggatatttataaagatccagattatgtcagaaaaggagatgctcgcctccctttgaaatggatggccccagaaacaatttttgacagagtgtacacaatccagagtgacgtctggtcttttggtgttttgctgtgggaaatattttccttaggtgcttctccatatcctggggtaaagattgatgaagaattttgtaggcgattgaaagaaggaactagaatgagggcccctgattatactacaccagaaatgtaccagaccatgctggactgctggcacggggagcccagtcagagacccacgttttcagagttggtggaacatttgggaaatctcttgcaagctaatgctcagcaggatggcaaagactacattgttcttccgatatcagagactttgagcatggaagaggattctggactctctctgcctacctcacctgtttcctgtatggaggaggaggaagtatgtgaccccaaattccattatgacaacacagcaggaatcagtcagtatctgcagaacagtaagcgaaagagccggcctgtgagtgtaaaaacatttgaagatatcccgttagaagaaccagaagtaaaagtaatcccagatgacaaccagacggacagtggtatggttcttgcctcagaagagctgaaaactttggaagacagaaccaaattatctccatcttttggtggaatggtgcccagcaaaagcagggagtctgtggcatctgaaggctcaaaccagacaagcggctaccagtccggatatcactccgatgacacagacaccaccgtgtactccagtgaggaagcagaacttttaaagctgatagagattggagtgcaaaccggtagcacagcccagattctccagcctgactcggggaccacactgagctctcctcctgtttaaaaggaagcatccacaccccaactcccggacatcacatgagaggtctgctcagattttgaagtgttgttctttccaccagcaggaagtagccgcatttgattttcatttcgacaacagaaaaaggacctcggactgcagggagccagtcttctaggcatatcctggaagaggcttgtgacccaagaatgtgtctgtgtcttctcccagtgttgacctgatcctcttttttcattcatttaaaaagcattatcatgcccctgctgcgggtctcaccatgggtttagaacaaagagcttcaagcaatggccccatcctcaaagaagtagcagtacctggggagctgacacttctgtaaaactagaagataaaccaggcaacgtaagtgttcgaggtgttgaagatgggaaggatttgcagggctgagtctatccaagaggctttgtttaggacgtgggtcccaagccaagccttaagtgtggaattcggattgatagaaaggaagactaacgttaccttgctttggagagtactggagcctgcaaatgcattgtgtttgctctggtggaggtgggcatggggtctgttctgaaatgtaaagggttcagacggggtttctggttttagaaggttgcgtgttcttcgagttgggctaaagtagagttcgttgtgctgtttctgactcctaatgagagttccttccagaccgttagctgtctccttgccaagccccaggaagaaaatgatgcagctctggctccttgtctcccaggctgatcctttattcagaataccacaaagaaaggacattcagctcaaggctccctgccgtgttgaagagttctgactgcacaaaccagcttctggtttcttctggaatgaataccctcatatctgtcctgatgtgatatgtctgagactgaatgcgggaggttcaatgtgaagctgtgtgtggtgtcaaagtttcaggaaggattttacccttttgttcttccccctgtccccaacccactctcaccccgcaacccatcagtattttagttatttggcctctactccagtaaacctgattgggtttgttcactctctgaatgattattagccagacttcaaaattattttatagcccaaattataacatctattgtattatttagacttttaacatatagagctatttctactgatttttgcccttgttctgtcctttttttcaaaaaagaaaatgtgttttttgtttggtaccatagtgtgaaatgctgggaacaatgactataagacatgctatggcacatatatttatagtctgtttatgtagaaacaaatgtaatatattaaagccttatatataatgaactttgtactattcacattttgtatcagtattatgtagcataacaaaggtcataatgctttcagcaattgatgtcattttattaaagaacattgaaaaacttga

SEQ ID NO: 22759 - DNA, 4870 bp, Homo Sapiens
atatggctccaagggaacaatgagacgtgctcttggtcttggaagctcatcagaatgtttagagctggggaggcctccaaacgcccattgcctgggccgtcgcccccaagggtgcggagtgtggaggttgcccgggggagggccggctacggattcacgctttcgggacaggcaccctgtgtgctcagctgcgtcatgagagggagccctgcggatttcgtgggcctccgagctggagaccagatacttgctgtcaatgaaatcaacgtgaaaaaagcatctcatgaagatgtagtgaaattaattgggaagtgctctggtgtccttcacatggtgattgctgaaggcgtcggccgcttcgaatcctgttccagtgatgaagaagggggactctatgaaggaaaaggctggctgaagcccaagctggattctaaagcactaggtataaacagagcagagcgagtcgtggaggaaatgcagtctggtggaattttcaatatgatttttgaaaacccgagcctttgtgcgagcaattcagagcccttgaaattgaaacaaagatccctttcggagtcggccgcaactcgatttgatgttggacatgaaagtataaataatccaaatcccaacatgctttctaaggaggaaatatcaaaagttattcatgatgattcggttttcagcattggactagaaagtcatgacgattttgcattggatgcaagtattttaaacgtggcgatgatcgtgggctacttaggctccattgagcttccttccacgagctccaacctggagtccgacagcttgcaagccatccgcggctgcatgcggcgcctgcgggcagagcagaaaatccactcgctggtgaccatgaagatcatgcacgactgtgtgcagctgagcactgacaaggctggagtcgtggccgagtacccggccgagaagctggccttcagcgccgtgtgcccggacgaccggcgatttttcgggttggttaccatgcagacgaatgacgacgggagcctggcccaggaggaggagggcgccctgcggacttcctgccacgtgttcatggtggacccagacttgtttaatcacaagatccaccaaggcattgctcggcggtttgggtttgagtgcacggccgacccagacaccaatggctgtctggaattcccggcgtcctccctccccgtcctgcagttcatctctgtcctgtaccgagacatgggtgagctgattgagggcatgcgggcccgcgcctttctggacggggacgccgatgcccaccagaacaacagcaccagcagcaacagtgacagcggcattgggaacttccaccaggaggagaagagcaaccgggtccttgtggtggacctgggtgggagctcgagcagacacggccccggaggcagcgcgtgggacggtgtgggtgggaggggtgcccagccctggggtgctccctggactgggcccttctgtccggaccccgaagggagccccccatttgaggccgctcatcagactgacaggttctgggacctaaacaagcacctagggccagcctctcctgtggaggtgcccccagcttccttgaggagctcagtccccccttccaagaggggcaccgtgggtgctggctgtggtttcaaccagcgctggctcccggtccacgtgctccgggagtggcagtgcggacacaccagcgaccaggactcttacacagattccaccgatggctggtccagcatcaactgcggcacactgccccctcctatgagcaagatccccgcagaccgctacagggtggagggcagcttcgcgcagcccccgctgaatgccccgaagagggagtggtccaggaaggcctttggaatgcaaagcatttttggtccccatcgaaatgttcgaaagactaaggaagataaaaagggctcaaaatttgggcggggaactggactcactcagccttctcaacgcacgtctgctcggagatcatttgggagatccaagagattcagtatcactcgctcccttgatgatcttgagtctgcaactgtgtctgatggcgagttgacgggcgccgacctgaaggactgcgtcagcaacaacagcctgagcagcaatgccagcctccccagcgtgcagagctgccggcgcctgcgtgagaggagggtcgccagctgggccgtgtcctttgagcgcctgctgcaggaccccgtcggtgtccgctacttctctgattttctaaggaaagaattcagtgaagaaaacattttattctggcaggcctgtgaatattttaatcatgttcctgcacatgacaaaaaggagctttcctacagggcccgggagattttcagtaagtttctctgcagcaaagccaccaccccggtcaacatcgacagccaggcccagctagcagacgacgtcctccgcgcacctcacccagacatgttcaaggagcagcagctgcagatcttcaatctcatgaagtttgatagctacactcgctttctgaagtccccgctgtaccaggaatgcatcctggcggaagtggagggccgtgcactcccggactcgcagcaggtccccagcagcccggcttccaagcacagcctcggttcagaccactccagtgtgtccacgccaaaaaagttaagtggaaaatcaaaatccggccgatccctgaatgaagagctgggggatgaggacagcgagaagaagcggaaaggcgcgtttttctcgtggtcgcggaccaggagcaccgggaggtcccagaaaaagagggagcacggggaccacgcagacgacgccctgcatgccaatggaggcctgtgtcgccgagagtcgcagggctctgtgtcctctgcggggagcctggacctgtcggaggcctgcaggactttggcacccgagaaggacaaggccaccaagcactgctgcattcatctcccggatgggacatcctgcgtggtggctgtcaaggcgggcttctccatcaaagacatcctgtccggactctgtgagcggcatggcatcaacggggcggccgcggacctcttcctggtgggcggggacaagcctctggtgctgcaccaagacagtagcatcttggagtcaagggacctgcgcctagaaaagcgcaccttgtttcggctggatcttgttccgattaaccggtcagtgggactcaaggccaagcccaccaagcccgtcacggaggtgctgcggcccgtggtggccagatacggcctggacctcagtggcctgctggtgaggctgagtggagagaaggagcccctggaccttggcgcccctatatcgagtctggacggacagcgggttgtcttggaggagaaggatccttccagaggaaaggcatccgcagataaacagaaaggtgtgccagtgaaacagaacacagctgtaaattccagctccagaaaccactcggctacgggagaggaaagaacactaggcaagtctaattctattaaaataaaaggagaaaatggaaaaaatgctagggatccccggctttcaaagagagaagaatctattgcaaagattgggaaaaaaaaatatcagaaaattaatttggacgaagcagaggagttttttgagcttatttccaaagctcagagcaacagagcagatgaccaacgtgggctgctaaggaaggaagacctggtgttgccagagttcctccgtttacctcctggttccacagaactcaccctccccactccagctgctgtggccaagggctttagcaagagaagcgccacaggcaacggccgggagagcgcctcccagcctggcgagcagtgggagccagtccaggagagcagcgacagtccgtccaccagcccgggctcagcctccagcccccctggacctcctgggacgaccccccccgggcagaagtctcccagcgggcccttctgcactccccagtcccccgtctccctcgcgcaggagggcaccgcccagatctggaagaggcagtctcaggaagtggaggccgggggcatccagacggtggaggatgagcacgtggccgagctgaccctgatgggggagggggacatcagcagccccaacagcaccttgctgccgccgccctccaccccccaggaagtgccaggaccttccagaccaggtacctccaggttctgatccctccaccttggccccgtaagcgtggtctgctcagcttccagtcagaaaggacagtgggcccccggctgccactgtttgctggtggtctccgtgaccccctcctcacctgctggttgggggcttccttggccctcttggaaaggaggggctcgtgtggccccaggccagtgtctgtcaggatggtccccccgaggcgctctgggcaggcatcctggtgtcctgagaggctcttgcaggaatgatacgtggcagtgcctgcagcgaggtctgggaacaccctgggtgaggcctgggggtttccgaaaatggaggcattcctttccaaatctggacagcgatcgtttttagtgtttctgtctcaagactggaaaacaatagcatttgtcttgagtgaggaagtgaagcccgctgtgttcatagcaggagagggctcccagacacaggcccgtcctcggaagagccttgagagtgcagctcggacccaccggcggcccccgtagcaggtggtgtgggtgctcgggagtggaggtgacgtcagcagcgctctctgaccgcgggtgtcacgggcatttctcaaaggaagcaggggattcagtgagtgtgaaggtgaacaggatggcctggcagcagggatgtttccgtgagccacaaataccagaaactgaggcgaggctcccagcag

SEQ ID NO: 22760 - DNA, 1760 bp, Homo Sapiens
gggtttttttctcccctccccacccccagaaaaataattagaaaaatgtttaggagaaaggaaaagaattagatgcatcagaataccagctataagccaacactgtttccagaaactcaagaaaaagctcaaacagaagacagttcccctgagaggctggaggcgttggtgctgaaggcaattttcctagctaaggggcactgggccttgctgcaccttggggctgaccttttttgcaaaacacccacccctgccctcctggcatactcaacagcaacgccagctttctggacccttggaaagatgttagctcaaacacccactttttccagatcttcctcttgctcttcactgaggaatttgtaattctgaggctagcgatgccgactcggatattccgcaggcccaggtgtttagattagaatttgtccagcggtaatcctgatgctggaaaccaacaaacatttggcctcatattcacccatttaaaaactagagcccctggcaggtccccttagggccatgtgttcatggaatataagccaagtttgccttaggcttgttcatggaatataagccaagtttacctctccccattttctgccctggcccacttcccactcacctccacctcattgccaggaagggatcaaaatgcctccatgccagttgttaatggctacatatttgcccttcccaagggtatttgcattttatttaggaacatggccttatattcaaggaaaatctagcatcaagattacgaggcatcacctctcaatcaggtctgggaggtatcttggggcattgctcttctgaacacctgcagaggcttcctcaggtgagtgtgggagcccggaagggtggcctccctaaccactctgcctgcacatgaattctccaaagcagtgggcccccatctgtttcaattacacatgcctgtcagcaaaaacttcgtgagatgcactctctctgtgtgtttattaatttatttaaagcatatatccctttacttttgtactactatattaggcacattataaaaagtatacagcatagaaactttaaatgaataagacacaaaatattataaacagaggttctggcattttctctctgaactcctgagggggaccttgggcacctcctggtatgtgcacaccccactttgaacacccttgctttagtgcaaatcagcacgcctaaatagcatcccaaaccactgtgcgacatttggcctgcagaataagaaagtcctaaggcagaatccccaggaacttcaaatctgggagatgaggaaagaaaactcactcacaaacaacataaatgtaaataattcaaaactctaaaggagagctgtccctagacagtagtggctacaggtgctaagcaaaagtcaggtacactggacagagccatgcgattgattgttcatcttccctctctgggtctccagaaaaggacactggcaatatccccagctctctcctgattggaattctttgaaccctcgaagtgctccagcagtactaccccccacgtagcagtgggcccatgtcgcttgaatattatttttgatttgaccaccaagatgtaatgatgattctattccattttgaaaagggtctgagaaagtgtacaggtctaattatatatacatatttatacatgtgtatttttgtttattgttacattttgacattggactttctattaaataatttttaagagttaaaaaaaaaaaaaaaaaaaaaaaaaaa

SEQ ID NO: 22761 - DNA, 1417 bp, Homo Sapiens
gtcggatccagtgttttaaaactgacaccaaagaatttgtgagagagattaagcattcatcatttggaagaaatgtatttgcaatttcatatataccaggcttgctctttgcagtgaatgggaagcctcattttggggaccaagaacctgtacaaggatttgtgatgaacttttccaatggggaaattatagacatcttcaagccagtgcgcaagcactttgatatgcctcatgatattgttgcatctgaagatgggactgtgtacattggagatgctcataccaacaccgtgtggaagttcaccttgactgagaaattggaacatcgatcagttaaaaaggctggcattgaggtccaggaaatcaaagaagccgaggcagttgttgaaaccaaaatggagaacaaacccacctcctcagaattgcagaagatgcaagagaaacagaaactgatcaaagagccaggctcgggagtgcctgttgttctcattacaacccttctggttattccggtggttgtcctgctggccattgccatatttattcggtggaaaaaatcaagggcctttggaggaaagggaagtggaggcttaaaccttggtaatttctttgcaagccgtaagggctacagtcgaaaagggtttgaccggcttagcactgagggcagtgaccaagagaaagaggatgatggaagtgaatcagaagaggagtattcagcacctctgcctgcgctcgcaccttcctcctcctgaaaaccaagctttgatttagattgagtaagatttacccagaatgtcagattcctttccctttagcacgtttaaagttctgtgtatttaattgtaaactgtactagtctgtgtgggactgtacacactttatttacttcgttttggttaagttggcttctgtttctagttgaggagtttcctaaaagttcataacagtgccattgtctttatatgaacatagactagagaaaccgtcctctttttccatcataattctaatctaacaatggaagatttgcccatttacacttttgagactttttggtggatgtaaataaccccattctttgcttgaacacagtattttcccaatagcactttcattgccagtgtctttctttggtgcctttcctgttcagcattcttagcctgtggcaataaagagaaactttgtgctacatgacgacaaagctgctaaatctcctatttttttaaaatcactaacattatattgcaatgaaggaaataaaaaagtctctatttaaattcttttttaaattttcttcagttggtgtgtttttgggatgtcttatttttagatggttacactgttagaacactattttcagaatctgaatgtaatttgtgtaataaagtgttttcagagcaaaaaaaaaaaaaaaaaa

SEQ ID NO: 22762 - DNA, 1254 bp, Homo Sapiens
ccacgactctgggagtggggaaacagagagccggttcctctgctgcagaagtcctcggggttccttctcacaactctgcgaaggggaaagggttgtgagacccaaccagaccccaactccagctcccagcaggaggtggctgcgccacactcgggaggcctcttggtttcagggtctctctgtctctctctcaccctcttcctcgctttctctgtctctctgtctctctctctctctctccctcgtccactcccccaaacatgtccaccggctccctcagcgatgtggaggaccttcaagaggtggagatgttggaatgtgacgggttgaaaatggattcgaacaaggaatttgtgacttccaacgagagcaccgaggagagctccaactgcgagaatgggtctccccagaagggccgcggcggcctgggcaagaggaggagggcgcccaccaagaagagccccctgagcggggtcagccaggaggggaagcaggtccagcgcaacgccgccaacgcgcgagagcgggcccgcatgcgagtgctgagcaaggccttctccagactcaagaccaccctgccctgggtgccccccgacaccaagctctccaagctggacacgctcaggctggcgtccagctacatcgcccacttgaggcagatcctggctaacgacaaatacgagaacgggtacattcacccggtcaacctgacgtggccctttatggtggccgggaaacccgagagtgacctgaaagaagtggtgaccgcgagccgcttatgtggaaccaccgcgtcctgaccttggaggtgcgagtctgggaaaggcgcgctcccggggggagcgggccccgggaaggcgacccctgccctcagtgctctctgtctctgcttccccctcgcaatgctcctctctctgtcccaccccgcgagaacactttacaacgacgaggagattcgtttccaaaccagaggagatcaattgtacttacaaagattcccatctatttaactttattaacttctaccgtgaatgactctgcaagccttgctggtccaagtgcaatatgtaattataaatatataaatagataagagcctatcaatgtatcttttgtacaatatgttgtaaaatgtagatcataggatagctgactttgacagtcacatttataaagtaattcacttaaagatatatatttttttcaaacaagttttgctacttttgaaaataaatctttctttatattgctaaa

SEQ ID NO: 22763 - DNA, 4985 bp, Homo Sapiens
cccgggactcgacaacatggcttccccgccccaccagcagctgctgcatcaccacagcaccgaggtgagctgcgactccagcggggacagcaacagcgtgcgcgtcaagatcaaccccaagcagctgtcctccaacagccaccccaagcactgcaaatacagcatctcctctagctgcagcagctctggggactccgggggcgtcccccggcgagtgggcggcggaggccggctgcgcaggcagaagaagctgccccagctgttcgagagggcctccagccgctggtgggaccccaagttcgactcggtgaacctggaggaggcctgcctggagcgctgcttcccgcagacccagcgccggttccggtatgcgctcttctacatcggcttcgcctgccttctgtggagcatctattttgcggtccacatgagatccagactgatcgtcatggtcgcccccgcgctgtgcttcctcctggtgtgtgtgggcttctttctgtttaccttcaccaagctgtacgcccggcattacgcgtggacctcgctggctctcaccctgctggtgttcgccctgaccctggctgcgcagttccaggtcttgacgcctgtctcaggacgcggcgacagctccaaccttacggccacagcccggcccacagatacttgcttatctcaagtggggagcttctccatgtgcatcgaagtgctctttttgctctataccgtcatgcacttacctttgtacctgagtttgtgtctgggggtggcctactctgtccttttcgagacctttggctaccatttccgggatgaagcctgcttcccctcgcccggagccggggccctgcactgggagctgctgagcagggggctgctccacggctgcatccacgccatcggggtccacctgttcgtcatgtcccaggtgaggtccaggagcaccttcctcaaggtggggcaatccattatgcacgggaaggacctggaagtggaaaaagccctcaaagagaggatgattcattccgtgatgccaagaatcatagccgatgacttaatgaagcagggagatgaggagagtgagaattctgtcaagaggcatgccacctcgagccccaagaacaggaagaaaaagtcttccatccaaaaagctcctatagccttccgcccttttaagatgcagcagatcgaagaagtcagtattttatttgcagatatcgtgggcttcaccaagatgagtgccaacaagtctgcccacgccctggtgggtctcctgaacgatctgttcggtcgcttcgaccgcctgtgtgaggagaccaagtgtgagaaaatcagcaccctgggagactgttactactgcgtggcgggctgtcccgagccccgggccgaccatgcctactgctgcatcgagatgggcctgggcatgatcaaggccatcgagcagttctgccaggagaagaaggagatggtgaacatgagagtcggggtgcacacgggcaccgtcctttgcggcatcctgggcatgaggaggtttaaatttgacgtgtggtccaacgatgtgaacctggccaatctcatggagcagctgggagtggccggcaaagttcacatttctgaggccaccgcaaaatacttagatgaccggtacgaaatggaagatgggaaagttattgaacggctgggccagagcgtggttgctgaccagttgaaaggtttgaagacatacctgatatcgggtcagagagccaaggagtctcgctgcagctgtgcagaggccttgctttctggctttgaggtcattgacggctcacaggtgtcctcaggccctaggggacaggggacagcgtcatcagggaatgtcagtgacttggcgcagactgtcaaaacctttgataaccttaagacctgcccttcgtgcggaatcacatttgctcccaaatctgaagccggcgccgagggaggagcacctcaaaacggctgccaagacgagcataaaaacagcaccaaggcttctggaggacctaatcccaaaactcagaacgggctcctcagccctccccaagaggagaagctcaccaacagtcagacttctctgtgtgagatcttgcaggagaagggaaggtgggcaggggtgagcctggaccagtcggctctccttccgctgaggttcaagaacatccgggagaaaacggacgcccactttgtggacgttatcaaagaagacagcctgatgaaagattacttttttaagccgcccattaatcagttcagcctgaacttcctggatcaggagctggagcgatcctacaggaccagctatcaggaagaggtcataaagaactcccccgtgaagacgtttgctagtcccaccttcagctccctcctggatgtgtttctgtcgaccacagtgtttctgacgctgtccaccacctgcttcctgaagtacgaggcggccaccgtgcctcccccgcccgccgccctggcggtcttcagtgcagccctgctgctggaggtgctgtccctcgcggtgtccatcaggatggtgttcttcctggaggacgtcatggcctgcaccaagcgcctgctggagtggatcgccggctggctaccacgtcactgcatcggggccatcctggtgtcgcttcccgcactggccgtctactcccatgtcacctccgaatatgagaccaacatacacttcccagtgttcacaggctcggccgcactgattgccgtcgtgcactactgtaacttctgccagctcagctcctggatgaggtcctccctcgccaccgtcgtgggggccgggccgctgctcctgctctacgtctccctgtgcccagacagttctgtattaacttcgccccttgacgcagtacagaatttcagttccgagaggaacccgtgcaatagttcggtgccgcgtgacctccggcggcccgccagcctcatcggccaggaggtggttctcgtcttctttctcctgctcttgttggtctggttcctgaatcgcgaatttgaagtcagctaccgcctccactaccacggagacgtggaagcggatcttcaccgcaccaagatccagagcatgcgggaccaggcagactggctgctgaggaacatcatcccctaccacgtggctgagcagctgaaggtgtcccagacctactccaagaaccacgacagcggaggggtgatcttcgccagcatcgtcaacttcagcgagttctacgaggagaactacgagggcggcaaggagtgctaccgggtcctcaacgagctcatcggggactttgacgagctcctaagcaagccggactacagcagcatcgagaagatcaagaccatcggagccacgtacatggcggcgtcagggctgaacaccgcgcaggcccaggacggcagccacccgcaggagcacctgcagatcctgttcgagttcgccaaggagatgatgcgcgtggtggacgacttcaacaacaacatgctgtggttcaacttcaagctccgcgtcggcttcaaccatgggcccctcacggccggggtcatcggcaccaccaagctgctgtacgacatctggggagacaccgtcaacatcgccagcaggatggacaccaccggcgtggagtgccgcatccaggtgagcgaagagagctaccgcgtcttgagcaagatgggctatgacttcgactacagagggaccgtgaatgtcaaggggaaaggccagatgaagacctacctgtacccaaagtgcacggatcacagggtcatcccagcaccagctgtccatctccccagacatccgcgtccaggtggatggcagcatcggacggtctcccacagacgagattgccaacctggtgccttctgtccagtatgtggacaagacatctctgggttctgacagcagcacgcaggccaaggatgcccacctgtcccccaagagaccgtggaaggagcccgtcaaagccgaagaaaggggtcgatttggcaaagccatagagaaagacgactgtgacgaaacaggaatagaagaagccaacgaactcaccaagctcaacgtttcaaagagtgtgtgaggcggcgcccacccgctgcccgaggtgctctgtttgtcgaaacacagtaatatttgtatttggctgttgtgctttccaagcgccacagttgccctccccggacgtggtgttatgtggtcatttcagccctaacttctgtgtggatcacagttattcagggttcattttcatccattcttccctttcgctcccttccctggaaaccccgctgcctctgggtcatccgttcagcacgtggtggagaacaagtgccttcagggctggcctcggcctcgagtctcgggacagaggccgccagtggagatcatggctttgggtattatttgacttttagaacaaaagctgtggttaagatctcatttttattgctttttcccacgtcccacgagacactattttcggttctctggctaataccctgtttttgagtttattttgtttctgtctatgtcacagtgtccccctacgacccgacctctctatgtaagcacacatgcgcacacacacttgcattcatgaatctgatataaagtgccagtaatccgccaagagggggtgcgaagggggcatgtcacgacagctccgccaccccccattgcccacccgcactttcccgagcaccgcgccccgtgggctgtgggtgagccgcgctccctgcactgagcgggtttaggggctcgcccacatgcatgcaggccaagacagcaaatgccagccgggcacgacgcctgtgtgcccaggcctcgggggtctcagagccgcctctcacccccgaccctccacccaggggtctccccgtcgggagtggaggcgttggtcctggaagctgactcatcggagagggaaataccaaataaacatccgaggttgcaaaaaaaaaaaaaaaaaaaaaaaaaaaaaaaaaaaaaa

SEQ ID NO: 22764 - DNA, 3756 bp, Homo Sapiens
atgagtacagaaagagactcagaaacgacatttgacgaggattctcagcctaatgacgaagtggttccctacagtgatgatgaaacagaagatgaacttgatgaccaggggtctgctgttgaaccagaacaaaaccgagtcaacagggaagcagaggagaaccgggagccattcagaaaagaatgtacatggcaagtcaaagcaaacgatcgcaagtaccacgaacaacctcactttatgaacacaaaattcttgtgtattaaggagagtaaatatgcgaataatgcaattaaaacatacaagtacaacgcatttacctttataccaatgaatctgtttgagcagtttaagagagcagccaatttatatttcctggctcttcttatcttacaggcagttcctcaaatctctaccctggcttggtacaccacactagtgcccctgcttgtggtgctgggcgtcactgcaatcaaagacctggtggacgatgtggctcgccataaaatggataaggaaatcaacaataggacgtgtgaagtcattaaggatggcaggttcaaagttgctaagtggaaagaaattcaagttggagacgtcattcgtctgaaaaaaaatgattttgttccagctgacattctcctgctgtctagctctgagcctaacagcctctgctatgtggaaacagcagaactggacggagaaaccaatttaaaatttaagatgtcacttgaaatcacagaccagtacctccaaagagaagatacattggctacatttgatggttttattgaatgtgaagaacccaataaccgactagataagtttacaggaacactattttggagaaacacaagttttcctttggatgctgataaaattttgttacgtggctgtgtaattaggaacaccgatttctgccacggcttagtcatttttgcaggtgctgacactaaaataatgaagaatagtgggaaaaccagatttaaaagaactaaaattgattacttgatgaactacatggtttacacgatctttgttgttcttattctgctttctgctggtcttgccatcggccatgcttattgggaagcacaggtgggcaattcctcttggtacctctatgatggagaagacgatacaccctcctaccgtggattcctcattttctggggctatatcattgttctcaacaccatggtacccatctctctctatgtcagcgtggaagtgattcgtcttggacagagtcacttcatcaactgggacctgcaaatgtactatgctgagaaggacacacccgcaaaagctagaaccaccacactcaatgaacagctcgggcagatccattatatcttctctgataagacggggacactcacacaaaatatcatgacctttaaaaagtgctgtatcaacgggcagatatatggggaccatcgggatgcctctcaacacaaccacaacaaaatagagcaagttgattttagctggaatacatatgctgatgggaagcttgcattttatgaccactatcttattgagcaaatccagtcagggaaagagccagaagtacgacagttcttcttcttgctcgcagtttgccacacagtcatggtggataggactgatggtcagctcaactaccaggcagcctctcccgatgaaggtgccctggtaaacgctgccaggaactttggctttgccttcctcgccaggacccagaacaccatcaccatcagtgaactgggcactgaaaggacttacaatgttcttgccattttggacttcaacagtgaccggaagcgaatgtctatcattgtaagaaccccagaaggcaatatcaagctttactgtaaaggtgctgacactgttatttatgaacggttacatcgaatgaatcctactaagcaagaaacacaggatgccctggatatctttgcaaatgaaactcttagaaccctatgcctttgctacaaggaaattgaagaaaaagaatttacagaatggaataaaaagtttatggctgccagtgtggcctccaccaaccgggacgaagctctggataaagtatatgaggagattgaaaaagacttaattctcctgggagctacagctattgaagacaagctacaggatggagttccagaaaccatttcaaaacttgcaaaagctgacattaagatctgggtgcttactggagacaaaaaggaaactgctgaaaatataggatttgcttgtgaacttctgactgaagacaccaccatctgctatggggaggatattaattctcttcttcatgcaaggatggaaaaccagaggaatagaggtggcgtctacgcaaagtttgcacctcctgtgcaggaatctttttttccacccggtggaaaccgtgccttaatcatcactggttcttggttgaatgaaattcttctcgagaaaaagaccaagagaaataagattctgaagctgaagttcccaagaacagaagaagaaagacggatgcggacccaaagtaaaaggaggctagaagctaagaaagagcagcggcagaaaaactttgtggacctggcctgcgagtgcagcgcagtcatctgctgccgcgtcacccccaagcagaaggccatggtggtggacctggtgaagaggtacaagaaagccatcacgctggccatcggagatggggccaatgacgtgaacatgatcaaaactgcccacattggcgttggaataagtggacaagaaggaatgcaagctgtcatgtcgagtgactattcctttgctcagttccgatatctgcagaggctactgctggtgcatggccgatggtcttacataaggatgtgcaagttcctacgatacttcttttacaaaaactttgcctttactttggttcatttctggtactccttcttcaatggctactctgcgcagactgcatacgaggattggttcatcaccctctacaacgtgctgtacaccagcctgcccgtgctcctcatggggctgctcgaccaggatgtgagtgacaaactgagcctccgattccctgggttatacatagtgggacaaagagacttactattcaactataagagattctttgtaagcttgttgcatggggtcctaacatcgatgatcctcttcttcatacctcttggagcttatctgcaaaccgtagggcaggatggagaggcaccttccgactaccagtcttttgccgtcaccattgcctctgctcttgtaataacagtcaatttccagattggcttggatacttcttattggacttttgtgaatgctttttcaatttttggaagcattgcactttattttggcatcatgtttgactttcatagtgctggaatacatgttctctttccatctgcatttcaatttacaggcacagcttcaaacgctctgagacagccatacatttggttaactatcatcctgactgttgctgtgtgcttactacccgtcgttgccattcgattcctgtcaatgaccatctggccatcagaaagtgataagatccagaagcatcgcaagcggttgaaggcggaggagcagtggcagcgacggcagcaggtgttccgccggggcgtgtcaacgcggcgctcggcctacgccttctcgcaccagcggggctacgcggacctcatctcctccgggcgcagcatccgcaagaagcgctcgccgcttgatgccatcgtggcggatggcaccgcggagtacaggcgcaccggggacagctga

SEQ ID NO: 22765 - DNA, 1228 bp, Homo Sapiens
ggcaaccccacatggctgagatgacctggtcctaggacacccttggacagaagactggcctacctagcagacctggatttttcttcctgatctgctgcttccaagttgtgtgaccttggctaagtcacttaacctttctgattgtcatttcgctttttaataaagtgggtctggtgaacaagaaatgtaataaacacgtggcttgccattcaagagatgagtctgaccattcactttctgtgtgccagagaagagagatcatgggtatagaccagcccctggaaaggctgctttggtcaaggctgagagcagctttgctcaaggaaattattcacgaaggtgaccactgtctttctgacctggcacagaggaaatgttggctgtgaatgtgaccaatagaaagaagcccgtatttctcagtcagtcctagaaccctggtaagtaattaacagagaataaaaatgtgtttgttaaatgacaaagcagcagtttttcaattgtaaggtctgcttgagagcctttgatgtgtgtttcttttcctgacttttcctttctttagaatttttgatggtctcacctggtgggtggggctttcagggtatgcccacaatgtacatttctcggcatctgtgcctcagtttcctcatttataaaatccctatgatctctgtctcacctactttacagggttgctgtgaagatcgcatactacacacaggaatgctcatcagtttttaaattttatttaatttttatttatttttttttaaatgtaattttttcagagagatgaggtcttgctatgttacccagcctagtcttgaactcctggcctcaagtgatcctcctgccttggcctcccatgctgctgggattacaggtgtgaactaccatgcccagccagctcctaagtcttaaggctctgtgttagtgatagatgtggccatggtgtaggcagtgcaatgtcttcgagtgagagtgaaggtggtaactcattgcatggattctagagttctgtttattctaatccaagttcttccacttaaaaacaatgttcttcctctcattgagtctcattcctcatctataggatgggaataagagcatgtacctggcaggttgttgtaaggattaaatggtgtaaaaaaatgtcaagtgcttgcaactttgaataccaaacttgagtgaaagctcaataaattgttacttaaaaaaaaaaaaaaaaaaa

SEQ ID NO: 22766 - DNA, 1478 bp, Homo Sapiens
cacagtcccttgaactcctcgagggacccacagaaccccagccaccgagaaccacttctgccccaaaagagtgcagttctcaccaaccatgccagggtggaccttgggtgacaggaacttctgccgtcccaccttctgagcccattctcagctatgagaacattttaaagtgtgcttttcaagaaataacagtccagcaggcagctgaagacgtttccaccatagaccatttcctagaaataagcagtgaagaaaaacctggcgttgaacgtgtacataaattgtgtaacgaatccagaaaactctggagagcccttcagagcatacacaccacgtctacttctcagcgcctctggagcgagtcccgttgccaggagaacttctttcttgttctcggaatagatgctgcgcagaagaacctttctggaggccagggccacatcatggaagattgtgacctcaaagagcctgaaggactcctcactgtcagcagcttctgtctccagcattgcaaagccctgatccagaccaagctctcggggccgcctggcagcaaacaggggaggctgatgacatgcagccgcttcctgaagaccccctcatgcggaggtggccagcacatcactattccaaggaaaaggatgttcactccacgcaagctcaaattgacactctttaatagcgacgtttgctaaaatcaggaggactttgtacctttatgaggaatttttcattttcttcctggctgggttgatgtggaaaccagagctgtctgtggagctgttttccagaccccaggcccattcctgggatctctccaacaggacctgtcctgtgttctgggcttgtctcgggtctgaccaggagatggaggatgtgtccttggcagagccaaggggagacagaggtttctggatgccatgacaggctgtcggggtccaggtggcactcatgggccccctgccccatgtgaatgctgctggcacctggtggggggttgcccagggatggaccctgggcatggcttctgggctgcttagtccagggggagcaacttgtggccaaatccatgagttcagaggaaaaggggaaggcactgaaacgtcaccagagagacagctgttgagaccgctcagaaaccctctgtctgtcacactctgccctggctgctgtgtggtcagggcaccatgagggtgtacagatgtgctgtgtcctcagagcctcgcaggtgccctcacttactgcctgggcccctgcccagcagcctcaaggacaggcctttgtccctcacggttgtggacaggaggtcgcaccactggcctgcgagagcctctggtgggcccgtggcttcccccagttatctgctaaggaaaactgtgctcttcgaagggcagagccaagaagtcagccctgacttttgtaaaattttactaaataaaaccacctggataaaaaaaaaaaaaaaaaaaaaaaaaaaa

SEQ ID NO: 22767 - DNA, 1927 bp, Homo Sapiens
gaataattgatggaacaactttctggaagagattagagggtatgtgtcttttgaactctggaagacttgattttagagaggataaaggaagaaagtggataattctagaattaaacaccaaaaggttctatgtgtctggcaccatgtgaagcaacttacctattatttcatttcatttcatttcatttcatttcatcctataacagtcctaagagatcaaataatttgtccacgattacacagtcagtatgtagcagggccagcattcaaatcctcatctgtctatcaaacccatattcccttctattatgctatactgttttcaagttgaaggaaatcaaaccaagaatttctgttttttcactgcgattataaggaaaaatattatttttctgaaatgagacatattgatgtttaagaccttgaggtgacaggtaaaatttggaatatctgtgatgggaaaatgcaaaaaggaaggaatgggtaaaagatacctattaccatctatgccctggtatttcacttcttccattgcacagcatagactttagattggccatggattaaaaatttgagaattctgacaaaaaaactaaatagaaaggagtttgttttttaagtaggtatatgatgggtcaaatataaacttactactaacaaaactttaaacaattccctaaatgccaaacttttataaacaaaaatcaaacaaaccatcaagcaaaagagtccatagccagcagaccaaatgttgaaatctctgggctaatttgtaagatctatgttttaaaactccttagtgaagaggggcaagaaaacctctcctctttttcctctcttggtggaaatgttttgttgttgttgttggttttttcctatactatatgtaatttctatattgttgttttgtgtattttggtattataaaattatacttcttagattccgttaagaatactttctggggtgtgagccacctgagttattagttagcaaaatgaacctggggaagtgggaagagctagtattctcaattggcaagggattgattcttcaatgggttcagcaattcacttccctctgaaattaagtggcaaagtaatagcatcccttaaaaaacaggacattggtgagaggtagaatagcaggaggaattttgaaacatggagggatggctactggaaaagaactgatgaagtgcagagtctctccagacaatggtagaaaccacaggactacattaagattgggcccaaatactagtttagaaaaaggtaaataaaactagctttacttaagagtacagccagcttaactactggctagtggacatatttcagacaaatctaactggagagaaaaacagaccaggagagaaagcgaagttacaaggaaatggaactagagaaacctcacaaagggataaaggaggtaattaaaggttaaagccagatagcctcgagctcaaaggagaaatattggaggccagataggaaagtgccttcctactcagggggttatggatccagggtggctaaagaatagaagtagagttccacccagggccagagggaacaatctgggattcagacacagcagtggtgccaacgtgaatctacctcgtgctagagtctgagtagcctagtctatcacccaacacagataagactggacaggggctcccaggaaccaacatctaagaagggagtttggagaggggctaaaagaaagcaggttaagccccaaatgtaactgaatgatgaccagggataactatttactagtgcttttatgatttattgtaactctgtaactttcccagtatttgttaattttttaacttctgtttctcctgtacttacgagcagtaaaagttgttcaaaacataaaaaaaaaaaaaaaaaaaaaaaaaaaaaaaaaaaaaaaa

SEQ ID NO: 22768 - DNA, 6345 bp, Homo Sapiens
ctctagactcgaggaattcccgcggcctgggcctgcgccgctcagctctctggaaactagcgcctcagctgcgcggcgcgtaggtcgcggggagctccgaaccgccggcgcccggccatggcggtctccaggctagatcgcctttttattttactggatactggcactactcctgttacaagaaaagctgctgcacagcaacttggagaagtggtgaagcttcatccccatgaactaaataatctcctgtctaaagtgttgatatatttaaggagtgcaaattgggatacccggattgcagcaggacaagctgttgaagctatagtgaaaaatgtacctgagtggaatccagtgccgagaaccagacaagaacctacttccgaaagttctatggaagattcacctactacagagcgattgaattttgacagatttgatatatgtagattgttacaacatggtgcatcactcctgggatctgctggtgccgaatttgaagtccaagatgaaaaatcaggtgaagtggatcctaaagagaggatagcacgccaacgaaaattattacagaagaaacttggccttaatatgggagaagcaattggaatgagtactgaagaacttttcaatgatgaggatttggattataccccaacttcagcatcctttgttaacaaacaacctactcttcaggcagctgaattgattgactcagagtttcgagcaggaatgagcaatagacaaaagaacaaagctaaaagaatggccaagttatttgcaaaacagagatccagggatgcagtggaaactaatgagaagagcaatgatagcactgatggggagccagaagaaaagagacggaaaatagcaaatgttgttattaatcagtctgcaaatgattccaaagtcttgattgataatattccagacagctcttccttaattgaagagacaaatgaatggcctttggaaagcttttgtgaagaactttgcaatgacctttttaatccctcctgggaggttcgacatggtgcaggcactggacttagggaaattcttaaagctcatgggaaaagtggtggtaaaatgggtgacagcactttagaagagatgattcagcagcatcaagagtggttggaagacttggttattagactcctttgtgtttttgcattagacagatttggagactttgtttctgatgaagttgtggcaccagttcgtgaaacttgtgctcaaacattaggtgtggttttaaaacacatgaacgaaacaggagttcataagactgtggatgtgctgctaaaattacttacacaagaacaatgggaagttagacatggtggtctgctgggaataaaatatgctttggcagtccgtcaggatgtaattaatactttattgcctaaagttttaactagaataattgaaggactccaggatcttgatgatgatgtcagagctgttgctgcagcatcattagtgcctgtagtagaaagccttgtctatcttcagacacaaaaggtgcccttcattataaatacattgtgggatgctcttctggaattagatgatctaacagcttcaacaaatagtattatgactctcctttcatccttgttaacttaccctcaggtccaacaatgcagtattcagcagtcactgacagttttagttccacgtgtctggccttttttgcatcacactatatcatcagttcgaagagcagcattggaaactctgtttacgttattatcaacacaggaccagaactcttcatcttggcttatacctatactgcctgatatgctccgacacatttttcagttctgtgttttggaaagcagccaggaaattctggaccttattcacaaggtttggatggaactgttgagtaaggcttcagttcagtatgtggtagcagctgcttgcccatggatgggtgcttggctttgcttgatgatgcagccttctcatttacctatcgatttaaatatgttgctagaagtaaaagctagagccaaggaaaaaacaggtggtaaggtgcgccaaggccaaagccagaataaagaagtacttcaggagtatattgcaggtgccgacaccatcatggaagacccagccaccagggattttgtagttatgcgggccagaatgatggcagccaagttgttaggagcactttgttgctgtatttgtgatccaggtgtaaatgtggtaactcaagaaattaaaccagctgaatccctgggccagttactactcttccatttgaactccaagtctgctttacagaggattagtgtagctttggtaatctgtgaatgggctgctttacaaaaggagtgtaaagctgttaccttagctgtgcagccgcgtttacttgatatcctttcagaacatttatattatgacgaaattgccgttccattcacacgaatgcagaatgaatgtaaacaacttatatcatcattagctgatgtacatattgaagttggtaatcgagtaaacaacaatgttttaacaatagatcaagctagtgacttggtcactactgtttttaatgaagccacatcatctttcgatttaaatcctcaagtgttacaacagttagatagtaaacgacagcaggtccaaatgacagttacagagaccaaccaggagtggcaagtgttgcagttgagagtgcatacttttgctgcctgtgcagttgtgagcttgcagcagcttccggagaaattaaatcctatcataaaaccattaatggagacaattaaaaaagaagagaatacactagtgcaaaactatgcagctcagtgcatagctaaactccttcagcagtgcacaacaaggacgccctgtcccaattcaaaaattattaaaaacctctgtagctcactttgtgtggacccatatctaactccttgtgtcacatgtccagtaccaacacaaagtggccaggaaaattctaaaggatccacctcagaaaaagatggaatgcaccatactgtcaccaagcacagaggtataattacactctacaggcaccagaaagctgcctttgctatcacaagtaggcgaggtcctacccccaaagcagtaaaagctcaaatagcagatcttcctgcaggaagtagtggaaatattcttgttgaacttgatgaggcccagaagccttacctggtacaacggagaggagctgaatttgctttgacaactatagtaaagcattttggtggtgaaatggcagtgaagttgccacatctctgggatgctatggttggcccattgaggaatacaatcgacataaataattttgatggaaaatccctcctggataagggagatagccctgctcaagaattggtgaattctctgcaggtttttgaaacagcagcagcttcaatggattctgagcttcatcccttgttggtccagcatttgccacatctttatatgtgccttcaataccccagtactgcagtgaggcacatggctgctcgttgtgtaggtgtcatgagcaaaatagctaccatggaaacaatgaatatttttttggagaaggttcttccgtggctgggagcaattgatgacagtgtcaaacaagagggtgcaattgaagcacttgcctgtgtaatggaacaactagatgttggtattgttccatatattgtccttttagttgttcctgtattaggaagaatgagtgatcagacagacagtgtgagattcatggccacgcagtgctttgcaacgctaattagactcatgccacttgaggcaggcattccagaccctccaaacatgtcagcagaattaatccaattgaaagccaaggagcgacactttttggagcaattgttagatgggaaaaaattggaaaattataaaattccagtaccaatcaatgctgaactcagaaaatatcagcaggatggtgtgaactggttagcatttcttaataagtataaacttcatggaattctgtgtgatgacatgggtttaggaaaaactttacagtccatctgcattctagcaggagatcattgtcatagggcccaggaatatgcaagatcaaaattagcagaatgtatgccacttccttccttagtggtttgtccgccaacattaacaggccattgggtggatgaagtaggtaaattttgctctagagaatatctcaacccgttgcattacactggacctcccactgaaagaataaggttacagcaccaagtaaaaaggcacaatctaatagtggcttcatatgatgttgtgaggaatgacatagatttctttagaaatattaaatttaactactgcattcttgatgaaggccatgtcatcaaaaatggaaaaacaaagttgtcaaaagcagtaaaacaactgactgctaattataggattattctttctggaacaccaatccagaacaacgttttggagctgtggtcattatttgatttcctcatgccaggatttttgggtactgaacgccagtttgctgctcgatatggtaaacctatattagcaagtagggatgctcgaagctccagtcgagagcaagaagcaggtgttcttgctatggatgcgctgcaccgccaagtactaccgtttcttttgagaagaatgaaagaagatgttttgcaggatcttccacctaaaattattcaagactattattgtactcttagtcctctccaggttcagctctatgaagattttgctaagtctcgtgccaagtgtgatgttgatgaaacagtttcttcagctacactttctgaagaaactgaaaaaccaaagcttaaagctacaggccacgtattccaggcattacagtacttacgtaaactgtgcaaccatccagcattagtcttaacacctcaacatccagaattcaagaccactgccgaaaaactggcagttcagaattcttctctacatgatattcaacatgcccctaagctctcagctttgaaacaattgctgttggactgcggtttgggaaatggcagcacttccgagagtggcacagagtctgttgtggcccagcacaggatactgatattctgtcagctgaaaagcatgcttgatatagtagagcatgatctcctcaaacctcacttgccctctgtcacttatttgagattagatggcagcatacctcctggtcagaggcattccattgtttcccggtttaataatgatccatctatagacgttctgttacttaccactcacgttggtggcctgggacttaatttgacaggcgctgacacagtagtatttgtggagcatgactggaatcctatgcgagatctacaagccatggaccgggcccatcgcattgggcagaaacgtgtggttaacgtataccgattgataaccagaggaacattggaagaaaaaataatggggttgcagaaattcaagatgaacatagcgaatactgttattagccaagagaattctagtttgcagagcatggggactgatcagcttcttgatctgtttactcttgataaggatggcaaagcagaaaaagctgacacctctacttctgggaaagcaagtatgaaatcaattcttgaaaacctgagtgatctttgggatcaagagcagtatgattcagagtacagcctggaaaattttatgcattctctcaagtaactatcaaatattgtaaatgcaattgctgctagttcagttacatttctgctgatattcagcaaatttctaagtttatggtgaacttttaactcaatgtgtaaatagatctggagaatattcagcataatgctggctcttgtttcactgggggaaacaagttattctcaaatatttgcactgtattaaatttaaatgttaatgtgaaatggtttaaattttacatgctgaaaagctgcagagcagaggaaccaaaccaggtttatttgtgctaccaggaggtgttcttaatgggaacaggcctcctatctttagtcactttgtacaggatgatatccatgagtactttagtgtttgtatatgttttttcttttaaatagaacttgtttttataattgatttaaaatagggctttttttctataaaagccttaatgagccataattttaagaatataagaataatgactatgatattggtcagtcttagaacatgaaaatgtcagacaatgaatttaatcgggcccttggtggaaacatttatatatttaatgcagatgcatagtgtttttcaaatctttaacatcattttttcaacttttaactataatatcaactattctaaatacaggtaatggtatatttaaggctaccataacatcctatttagagggtggttttt

SEQ ID NO: 22769 - DNA, 558 bp, Homo Sapiens
  misc_feature (3)..(3): n is a, c, g, or t
  misc_feature (5)..(5): n is a, c, g, or t
  misc_feature (542)..(542): n is a, c, g, or t
  misc_feature (553)..(553): n is a, c, g, or t
ctngnggggcggttgcattcagcgagacaccgctaacaacatgcgtaagaagggcaagcccaacccggaccagaggtacttcatgctggtggtggccctccaggctcatgcacagaaccagaactacacgctggccgcccagatctcagagcgcatcattgtgcgggcctccaacccaggccagttcgagagcgacagcgatgtgttgtggcagcgggcacaggtgcccgacaccgtcttccaccacggccgcgtgggcatcaacacagaccggccggatgaggcgctggttgtgcacgggaatgtcaaggtcatgggctcgcttatgcacccctccgacctgcgcgccaaggaacacgtgcaggaggtggacaccaccgagcaattgaagaagatctcgcgcatgcggctggtgcactacagatacaagcccgagttcgccgccagcgcgggcatcgaggccaccgcgccagagacaggtgtcatcgctcaggaggtgaaggagatcttgcctgaggctgtgaaagacaccggagacatgnctttgccaatnggaaa

SEQ ID NO: 22770 - DNA, 4929 bp, Homo Sapiens
agccttgagtgtcattcaagggacagcacaacctcatccaagctctcctacctctgcccagccgtccctctcatcctccccattcctcgtccacactccatccaaagaagagggaaagcaccgaatagaggggggcgaaggcaaagtctgctgttcttccccctgggcccccttgctcctccatcctcattctctcaccaccagcccccctaaccccaaggagcccaggaactgaggcgactcgccccactgccatgtccaaaagcttgaaaaagaaaagccactggactagcaaagtccatgagagtgtcattggcaggaacccggagggccagctgggctttgaactgaaggggggcgccgagaatggacagttcccctacctgggggaggtgaagcccggcaaggtggcctatgagagcggcagcaaattggtgtcggaggagctgctgctggaggtgaacgagacccccgtggcggggctcaccatcagggacgtgctggccgtgatcaaacactgcaaggaccccctccggctcaagtgtgtcaagcaaggaggaattgttgataaagaccttcgtcactacctcaacttacgatttcaaaagggttctgtggaccatgagcttcagcaaatcattcgtgacaacctctacctccgcacggtgccatgcaccacaaggccacataaggagggtgaggtccctggagtggattatattttcatcactgttgaagattttatggaattggagaaaagtggtgctctcctagaaagtgggacttatgaagacaattactacggtaccccaaagccgccagcagaaccagcaccattattgttaaatgtaacagaccagatacttccaggagccactccaagtgctgaaggaaaacggaagaggaataaatcagtgagcaacatggagaaagccagtatagagcctcctgaggaggaagaggaagagaggcctgtggtcaatggaaatggagtagtagtaacaccagaatccagtgaacatgaagacaaaagtgcaggtgcctcaggggagatgccctcccagccttatcctgcaccagtgtacagtcagcctgaggagctgaaggagcagatggatgacacaaagccaactaaacctgaagacaatgaggaaccagacccattgcctgataactgggaaatggcctatacagagaagggcgaagtctacttcattgaccataacacaaagacaacatcatggctggatccacgacttgcgaaaaaagctaaacctccagaagagtgcaaagaaaatgagcttccatatggctgggaaaaaatcgatgatcccatttatggcacttattatgttgaccacataaatagaagaacacagtttgaaaatcctgtcctggaagcaaaaaggaagctacagcaacataacatgccccacacagaacttggaacaaagcccctgcaggccccaggtttccgagaaaaaccactcttcacccgggatgcatcccagttgaagggaacattcctcagcaccaccctaaaaaagagcaacatgggctttggatttaccatcattggtggagacgagcctgatgagtttctgcaggtgaaaagtgtgattccggatgggcctgcagcacaggatggaaaaatggaaacaggtgatgtcattgtctatattaatgaagtttgtgtccttggacacactcatgcagatgttgtcaaacttttccagtctgttcctattggtcagagtgtcaacctggtgttgtgtcgtggctaccctttgccctttgatcctgaagaccctgctaacagcatggtgccaccccttgcaataatggagaggccacctccagtgatggtcaatggaagacacaactatgaaacatatttggagtacatttctcggacctcacagtcagttccagatataacagatcggccgcctcattctctgcactccatgccaactgatggtcagctagacggcacgtatccaccgcccgtccatgatgacaatgtgtctatggcttcatctggggccacccaagctgaacttatgaccttaaccattgtgaaaggtgcccagggcttcggcttcactattgccgacagtcctacaggacagcgggtgaaacaaatacttgacattcagggatgccctggcctgtgtgaaggcgacctcattgttgagatcaaccagcagaatgtacagaacctgagccatacagaagtagtggatatacttaaggactgtcccattggaagtgaaacttctttgattatccatcgaggaggtttcttttctccatggaaaactccaaagcctataatggaccgatgggagaatcaaggcagtcctcaaacgagtttatctgctccggccataccgcagaacctgcccttcccacctgcccttcacaggagctcctttcctgactcaacagaggcctttgacccacggaagcctgatccatatgagctctacgagaaatctagggccatttatgaaagtaggcaacaagtgccacccaggaccagttttcgaatggattcctctggtccagattataaggaattggatgttcatcttcggaggatggagtctggatttggcttcagaatcctcgggggagatgagcctggacagcctattttgattggagctgtcattgccatgggctcagccgacagagatggccgccttcacccaggagatgagcttgtgtatgttgatgggattccagtagccggcaaaacccaccgctatgtcatcgacctcatgcaccacgcagcccgcaatgggcaggtcaacctcactgtgagaagaaaggtgctatgtggaggggagccctgcccagagaacgggagaagtccaggctctgtatccacccaccacagctctccacgcagtgactacgcaacctacaccaacagcaaccacgctgcccccagtagcaatgcctctccccctgaaggcttcgcctcccacagcctgcagaccagtgatgtggtcattcaccgcaaagagaatgagggcttcggctttgtcatcatcagctccctgaacaggcctgagtctggatccactataactgtgycccataaaatcggacgcatcattgatgggagtcctgcagatcgctgtgcaaaactaaaagtgggagaccggatcctagcagtgaatggccagtctatcatcaacatgcctcacgctgacatcgtgaagctcatcaaggatgcaggtcttagtgtcacccttcgcatcattcctcaggaggagctcaacagccccacctcggcacccagctcagagaagcagagtcccatggcgcagcagagtcccctggcacagcagagtcccctggcccagccaagcccagccacccccaacagccccatcgcccagccagcaccacctcaaccacttcagctgcaaggacacgaaaatagttacaggtcagaagtgaaagcaaggcaagatgtgaaaccagacatccgacagcctccattcacagactacaggcagcccccgctggattacaggcaacccccaggaggggactaccagcagcccccacccttggactacaggcagcctcccctgctggactacaggcagcactcccccgacaccaggcagtaccctctgtcggactacagacaaccccaggattttgattatttcactgtggacatggagaaaggagccaaaggatttggattcagcattcgtggaggaagggaatacaaaatggatttgtatgtgttgagactggcagaagatggaccagcaataaggaatgggaggatgagggtaggagatcaaatcattgaaatcaatggggaaagcacaagggacatgacacatgccagagcaatagaactcatcaaatctggaggaagacgagtgaggctgctgctcaagagaggcacgggacaggtcccacaatatgacgaacccgccccctggagttctcccgctgccgccgccccatgtctgccggaagtaggcgtctccctggacgacggcctcgctccattctctccatcacatccagccccaccctccgacccttcccaccagataagcccaggcccaacttgggatatcaaacggaaacacgacgttaggaaaccaaaggagctttcagcctgcggccagaagaagcagcgcctcggggagcagagggagcgctcggcgagtccgcagagggccgcgcggccgaggctcgaggaggcgcccggcggccaggggcggcccgaggccggcaggcccgcctcggaggccagggcgcccgggctcgcggcggcagacgcggcggacgcggcgcgggcgggcgggaaggaggcgccccgtgcggcggcgggctccgagctctgccggcgcgaaggcctgggggctgcgccggcgagtgctgacccggcagacggcggcagcggcgcgctggcggccgagggcagggcgggtgcgcgcgcggcaccccgatcggtgccgcgaccgccggcgggcgccgccgcgcgcagggcggccggcgcgccggggycctggaaggtgcggggttctgacaagctgccgagcgtcctcaaacccggcgcctcggccgccagcagatgagccgcgcggccacggccaacccgcccgccccggcgcaggcagttcttcttaggttccgtctcacggcgttttaatttattttcactgtcacacgcatagatccacgaggcaccaaggcctgggagcatggacgtggagtcccacgtgtccggtgtgcttgggcggcatcgcatcaacgcgcagacctaaactgatcctaaagcccccggttcccttgtgggggctttggcagctatggaagaaccaaaataacgtgaagaacatcacagagagacagtgcagtgtagctttagtttaagaaaaaaaa

SEQ ID NO: 22771 - DNA, 3065 bp, Homo Sapiens
tagttattaaagttcctatgcagctccgcctccgtccggcctcatttcctcaaaaaatccctgctttccccgctcgccacgccctcctgctacccggctttaaagctagtgaggcacagcctgcggggaacgtagctagctgcaagcagaggccggcatgaccaccgagcagcgacgcagcctgcaagccttccaggattatatccggaagaccctggaccctacctacatcctgagctacatggccccctggtttagggaggaagaggtgcagtatattcaggctgagaaaaacaacaagggcccaatggaggctgccacactttttctcaagttcctgttggagctccaggaggaaggctggttccgtggctttttggatgccctagaccatgcaggttattctggactttatgaagccattgaaagttgggatttcaaaaaaattgaaaagttggaggagtatagattacttttaaaacgtttacaaccagaatttaaaaccagaattatcccaaccgatatcatttctgatctgtctgaatgtttaattaatcaggaatgtgaagaaattctacagatttgctctactaaggggatgatggcaggtgcagagaaattggtggaatgccttctcagatcagacaaggaaaactggcccaaaactttgaaacttgctttggagaaagaaaggaacaagttcagtgaactgtggattgtagagaaaggtataaaagatgttgaaacagaagatcttgaggataagatggaaacttctgacatacagattttctaccaagaagatccagaatgccagaatcttagtgagaattcatgtccaccttcagaagtgtctgatacaaacttgtacagcccatttaaaccaagaaattaccaattagagcttgctttgcctgctatgaaaggaaaaaacacaataatatgtgctcctacaggttgtggaaaaacctttgtttcactgcttatatgtgaacatcatcttaaaaaattcccacaaggacaaaaggggaaagttgtcttttttgcgaatcagatcccagtgtatgaacagcagaaatctgtattctcaaaatactttgaaagacatgggtatagagttacaggcatttctggagcaacagctgagaatgtcccagtggaacagattgttgagaacaatgacatcatcattttaactccacagattcttgtgaacaaccttaaaaagggaacgattccatcactatccatctttactttgatgatatttgatgaatgccacaacactagtaaacaacacccgtacaatatgatcatgtttaattatctagatcagaaacttggaggatcttcaggcccactgccccaggtcattgggctgactgcctcggttggtgttggggatgccaaaaacacagatgaagccttggattatatctgcaagctgtgtgcttctcttgatgcgtcagtgatagcaacagtcaaacacaatctggaggaactggagcaagttgtttataagccccagaagtttttcaggaaagtggaatcacggattagcgacaaatttaaatacatcatagctcagctgatgagggacacagagagtctggcaaagagaatctgcaaagacctcgaaaacttatctcaaattcaaaatagggaatttggaacacagaaatatgaacaatggattgttacagttcagaaagcatgcatggtgttccagatgccagacaaagatgaagagagcaggatttgtaaagccctgtttttatacacttcacatttgcggaaatataatgatgccctcattatcagtgagcatgcacgaatgaaagatgctctggattacttgaaagacttcttcagcaatgtccgagcagcaggattcgaagagattgagcaagatcttactcagagatttgaagaaaagctgcaggaactagaaagtgtttccagggatcccagcaatgagaatcctaaacttgaagacctctgcttcatcttacaagaagagtaccacttaaacccagagacaataacaattctctttgtgaaaaccagagcacttgtggacgctttaaaaaattggattgaaggaaatcctaaactcagttttctaaaacctggcatattgactggacgtggcaaaacaaatcagaacacaggaatgaccctcccggcacagaagtgtatattggatgcattcaaagccagtggagatcacaatattctgattgccacctcagttgctgatgaaggcattgacattgcacagtgcaatcttgtcatcctttatgagtatgtgggcaatgtcatcaaaatgatccaaaccagaggcagaggaagagcaagaggtagcaagtgcttccttctgactagtaatgctggtgtaattgaaaaagaacaaataaacatgtacaaagaaaaaatgatgaatgactctattttacgccttcagacatgggacgaagcagtatttagggaaaagattctgcatatacagactcatgaaaaattcatcagagatagtcaagaaaaaccaaaacctgtccctgataaggaaaataaaaaactgctctgcagaaagtgcaaagccttggcatgttacacagctgacgtaagagtgatagaggaatgccattacactgtgcttggagatgcttttaaggaatgctttgtgagtagaccacatcccaagccaaagcagttttcaagttttgaaaaaagagcaaagatattctgtgcccgacagaactgcagccatgactggggaatccatgtgaagtacaagacatttgagattccagttataaaaattgaaagttttgtggtggaggatattgcaactggagttcagacactgtactcgaagtggaaggactttcattttgagaagataccatttgatccagcagaaatgtccaaatgatatcaggtcctcaatcttcagctacagggaatgagtaactttgagtggagaagaaacaaacatagtgggtataatcatggatcgcttgtacccctgtgaaaatatattttttaaaaataaaaaaaaaaaa

SEQ ID NO: 22772 - DNA, 1722 bp, Homo Sapiens
gcggccggtcgaccggagtggctgccctgcgcggggacactcagagcccggtgggcgggaggaaggcggcatgccccagacggtgatcctcccgggccctgcgccctggggcttcaggctctcagggggcatagacttcaaccagcctttggtcatcaccaggattacaccaggaagcaaggcggcagctgccaacctgtgtcctggagatgtcatcctggctattgacggctttgggacagagtccatgactcatgctgatgcgcaggacaggattaaagcagcagctcaccagctgtgtctcaaaattgacaggggagaaactcacttatggtctccacaagtatctgaagatgggaaagcccatcctttcaaaatcaacttagaatcagaaccacaggacgggaactactttgaacacaagcataatattcggcccaaacctttcgtgatcccgggccgaagcagtggatgcagcactccctccgggattgactgtggcagtggacgcagcaccccttcttctgtcagtactgttagtaccatttgcccaggtgacttgaaagttgcggctaagctggcccctaacattcctttggaaatggaacttcctggtgtgaagattgtacatgctcagtttaatacacctatgcagttgtactcagatgacaatattatggaaacactccagggtcaggtttcaacagccctaggggaaacacctttgatgaacgagcccacagcctcggtgccccccgagtcggacgtgtaccggatgctccacgacaatcggaatgagcccacacagcctcgccagtcgggctccttcagagtgctccagggaatggtggacgatggctctgatgaccgtccggctggaacgcggagtgtgagagctccggtgacgaaagtccatggcggttcaggcggggcacagaggatgccgctctgtgacaaatgtgggagtggcatagttggtgctgtggtgaaggcgcgggataagtaccggcaccctgagtgcttcgtgtgtgccgactgcaacctcaacctcaagcaaaagggctacttcttcatagaaggggagctgtactgcgaaacccacgcaagagcccgcacaaagcccccagagggctatgacacggtcactctgtatcccaaagcttaagtctctgcaggcgtggcacgcacgcacgcacccacccacgcgcacttacacgagaagacattcatggctttgggcagaaggattgtgcagattgtcaactccaaatctaaagtcaaggctttagacctttatcctattgtttattgaggaaaaggaatgggaggcaaatgcctgctatgtgaaaaaaacatacacttagctatgttttgcaactctttttggggctagcaataatgatatttaaagcaataattttttgtatgtcatactccacaatttacatgtatattacagccatcaaacacataaacatcaagatatttgaaggactctaattgtctttccttgacaagttgattttgcaattgtggtaaatagcaaataacaatcttgtattctaacataatctgcagttgtctgtatgtgttttaactattacagtgcatgttagggagaaattccctgaatttctttagttttgtattcaaacaattatgccactcgatgcaacaaacataataaatacataaaggatttaaaaaaaaaaaaaaaaaaaa

SEQ ID NO: 22773 - DNA, 2889 bp, Homo Sapiens
atggatgaacaggctctattagggctaaatccaaatgctgattcagactttagacaaagggccctggcctattttgagcagttaaaaatttccccagatgcctggcaggtgtgtgcagaagctctagcccagaggacatacagtgatgatcatgtgaagtttttctgctttcaagtactggaacatcaagttaaatacaaatactcagaactaaccactgttcaacaacagctaattagggagacgctcatatcatggctgcaagctcagatgctgaatccccaaccagagaagacctttatacgaaataaagccgcccaagtcttcgccttgctttttgttacagagtatctcactaagtggcccaagtttttttttgacattctctcagtagtggacctaaatccaaggggagtagatctctacctgcgaatcctcatggctattgattcagagttggtggatcgtgatgtggtgcatacatcagaggaggctcgtaggaatactctcataaaagataccatgagggaacagtgcattccaaatctggtggaatcatggtaccaaatattacaaaattatcagtttactaattctgaagtgacgtgtcagtgccttgaagtagttggggcttatgtctcttggatagacttatcccttatagccaatgataggtttataaatatgctgctaggtcatatgtcaatagaagttctacgggaagaagcatgtgactgtttatttgaagttgtaaataaaggaatggaccctgttgataaaatgaaactagtggaatctttgtgtcaagtattacagtctgctgggtttttcagcattgaccaggaagaagatgttgacttcctggccagattttctaagttggtaaatggaatgggacagtcattgatagttagttggagtaaattaattaagaatggggatattaagaatgctcaagaggcactacaagctattgaaacaaaagtggcactgatgttgcagctactaattcatgaggatgatgatatttcttctaatattattggattttgttacgattatcttcatattttgaaacggcttacagtgctctcggatcagcaaaaagctaatgtagaggcaatcatgttggccgttatgaaaaaattgacttacgatgaagaatataactttgaaaatgagggtgaagatgaagccatgtttgtagaatatagaaaacaactgaagttactgttggacaggcttgctcaagtttcaccagagttactactggcctctgttcgcagagtttttagttctacactgcagaattggcagactacacggtttatggaagttgaagtagcaataagattgctgtatatgttggcagaagctcttccagtatctcatggtgctcacttctcaggtgatgtttcaaaagctagtgctttgcaggatatgatgcgaactctggtaacatcaggagtcagttcctatcagcatacatctgtgacattggagttcttcgaaactgttgttagatatgaaaagtttttcacagttgaacctcagcacattccatgtgtactaatggctttcttagatcacagaggtctgcggcattccagtgcaaaagttcggagcaggacggcttacctgttttctagatttgtcaaatctctcaataagcaaatgaatcctttcattgaggatattttgaatagaatacaagatttattagagctttctccacctgagaatggccaccagtccttactgagcagcgatgatcaactttttatttatgagacagctggagtgctgattgttaatagtgaatatccggcagaaaggaaacaagccttaatgaggaatctgttgactccactaatggagaagtttaaaattctgttagaaaagttgatgctggcacaagatgaagaaaggcaagcctccctagcagactgtcttaaccatgctgttggatttgcaagtcgaaccagtaaagctttcagcaacaaacagactgtgaaacaatgtggctgttccgaagtttatctggactgtttacagacattcttgccagccctcagttgtcccttacaaaaggatattctcagaagtggagtccgtactttccttcatcgaatgattatttgcctggaggaagaagttcttccgttcattccatctgcttcagaacatatgctcaaagattgtgaagcaaaagatctccaggagttcattcctcttatcaaccagattacggccaaattcaagatacaggtatccccgtttttacaacagatgttcatgcccctgcttcatgcaatttttgaagtgctgctccggccagcagaagaaaatgaccagtctgctgctttagagaagcagatgttgcggaggagttactttgctttcctgcaaacagtcacaggcagtgggatgagcgaagttatagcaaatcaaggtgcagagaatgtagaaagagtgttggttactgttatccaaggagcagttgaatatccagatccaattgcacagaaaacatgttttatcatcctctcaaagttggtagaactctggggaggtaaagatggaccagtgggatttgctgattttgtttataagcacattgtccccgcatgtttcctagcacctttaaaacaaacctttgacctggcagatgcacaaacagtattggctttatctgagtgtgcagtgacactgaaaacaattcatctcaaacggggcccagaatgtgttcagtatcttcaacaagaatacctgccctccttgcaagtagctccagaaataattcaggagttttgtcaagcgcttcagcagcctgatgctaaagtttttaaaaattacttaaaggtgttcttccagagagcaaagccctga

SEQ ID NO: 22774 - DNA, 3748 bp, Homo Sapiens
cgtctgtaaacacccagagactgtcatggagggggaggaggaggcggcggcggcgaagggaggcgtttggggccgcctccagggtccgctctgccattcctgaactggtccctcgtccccgtgactctggcatcagggaagcgaactgttaggcgagaggaggaggcagccagaaccatatccccttcttcctcggggcgggggccgggccaggccggctgagccgggggagggctccgggagggagtgcctggccaggccggcctgtctgccgcgatggatgacagtaaggtggttggaggcaaagtaaagaagcccggtaaacgtggtcggaagccagccaaaattgacttgaaagcaaaacttgagaggagccggcagagtgcaagagaatgccgagcccgaaaaaagctgagatatcagtatttggaagagttggtatccagtcgagaaagagctatatgtgccctcagagaggaactggaaatgtacaagcagtggtgcatggcaatggaccaaggaaaaatcccttctgaaataaaggccctactcactggagaagagcagaacaaatctcagcagaactcaagcaggcataccaaggctgggaagacagatgctaatagcaattcctggtgaagattatataaagatgagtcagtgattgaagccaatattctgattcccatggaagatggatgggcaagagtgtacttcttggctccatttactacctactgctcagtagtcatctctgtaaatctgcaatttctaccaaaatgtgtgatcgtagatctcaaaggatcttgctttaactttcaacacttagaaaatctacaaacattcagacctgtctgggttggtattgccacccatgacatttaacatgttgtgatgcttgaaaacacaggagtagagaaaatcgatgaagattgtatttttgcaccttaactccacattgctttattggttaatttatattctttccatgtaattcatgtaattgtatgtctgtgtgtgttttatgtgtcaccacctttcatgtttttgattgccctacaaagagaaaccaaatgagctgattactgactataagttctcagcctttatggacctaatcttatttttatttacttgagtaatgtttattctctgcatgaaccatgatttctcctgtgagccattccagcataagctgtgaatatgtattaacaaatatatacatttctatttttataatccataaggatatgcctgttttaaataacatacatattaacaatatctatcaggaaaaccctcaagacagcttctagttaaaacctttgttgctgtcctctcaaactatatttataaaaatttgctagggccaaatccatacttgcagaataattcatcaaattttatttttaagtgaaaagtaacctttcaggcatttcagcagcatacattgacaatctagggtatatatgtatgtatgtttcttattgtatgtctatatatgtatgtggggaggacaggagtgaatgttcacacacttttcttgcgtactcaactaaattggagaatgtttctgaagaaaattggatgaaattagctgctgagattgagtttctgccttaaaatctgaaacaaaaaaagggacaaattgctggtagatctactgactgtagccatcaccagaacacttagtttcttcccagacatgaatttcctgacaggctctgagccagaaacacactgtgggcgtgcatctggttcagccctggatatgcctccactgtggagggaagcattggaactggagttgtgcacagcaccgcagctagtgggcctggctgggggtgcagaagggcagggtagttctttccatttccccttgcagctacacttactttctccctgactaccaaatggagtgacggttgaagaatcaagctcataatatgatacacccagacagacccagaaatcttttgatttccccagcgagatacttaccactctctcttctctttcccatggttaaaacaggagttgtgttctctgtcgctgctaaattattcttcacttgagtgaagcaaatatttagcttccaaataaagtatattttgttctgaactggcagtttaagaggagataccgtagtctagattgtctttgaggtagaatatatgatggaccacatagtttaagattacaaggtactttccctcttctctcaggccatgcatttgaataaagtgcctcccttagcctgagctcctaaagacctcttgtacttggttgcaaactcagatctctagtctagtctagtctagtctagtctagtcatgtgtgactgtgtactgagataccactagcccagtttgctgggtctctatgttttggaagttgggggtttaataatatttaatgtctttttaggatcataaacataaataggtttgttgatattcaggccttcagaatttaagggttttaaatatagcattcagattgtaattggtatgtttttgccatctggtccactcaattgtatatttttattttgcaaaacaacccaaaacttactttaygttgctttgttcagtaccttttgaattcccccagaagagttgttttcaaaacaaacattccagaatgaatgtcgctcttcaatggaacgtctttattgtgcttgaagtatttcttctctggttgtaattctaaattacagagtcatttgagctttctcccctcccgctagtatctttacaggagcagggaagagcagtagaggatgtataattttgggcgaagttaaattacaatttatttgaggttattcctaaacctatttatttggtgttttggaggagatcacacactaagagaacgttgattgcctcggctattgtgctggctggacactttggtcacttttgaagcatgttaataaatgtcactgattaaaacagctggagcatttccttccctttccagtgaaggagcagcatagtgaaatcctggcacccctcacctttttgtgatgacaagatggctgacagtcacggagtccaggagaaggtgctgctctccttgctttctgagtaaacagagtaatgttttttttcttattttcccaaagaaagaaaagggggaaaatatatttgtatgtttagaccagccaaattctgtcattattttagtatcaacctgctgtatattagagcaactgaatataatatggaataagtttgaccaggtcaagttttaggatatagttgaatttctttaaaaagttttctattttatctaaaatctttctattatatctaaattagaatgatcatcctgcgcaaattcagattactgtttgctggctaattgacagtatttctcagcatcactatgtagcattctgttttagcatctttgaattatgatcatttgatttggctaattacaaaaagtacaggtttaaactggacttaccttgagttaaaggcaaagaaaatctaaaaacataaatgttatatttcacaagaaatcagttgcatattatccattacatatttagttttaaaaggaggagtcaccttgaattattttctgagtcaccttgagttatttgatctctcagcctgctttctcatctgtaaaaaaggggggaggataactttcacagggtaattggtaggctaaataggagttacagaaaactgttaaatagggaagaactacattaaatttaaatattcacatt

SEQ ID NO: 22775 - DNA, 2180 bp, Homo Sapiens
atgtaccggcgcagctacgtgttccagacccgcaaggagcagtacgagcacgccgacgaggcttcgcgcgccgccgagcccgagcgcccggccgacgagggctgggctggggcaacgagcctggcggcgctgcaggggctcggcgagcgcgtggccgcccacgtccagcgggcccgcgccctcgagcagcgccatgccgggctccggaggcagctggatgccttccagcgcctgggcgagctggccgggcccgaggacgccctcgcccgccaagtcgagagcaaccgtcagcgcgtccgggacctggaggccgagcgcgcccggctggagcgccagggcaccgaggcgcagcgcgcgctcgacgagttccgaagcaagtatgaaaatgagtgcgaatgtcaactcctgctaaaagaaatgcttgaacggcttaacaaggaagctgatgaagccttgctgcataacctacgccttcagctggaagcccaatttctgcaagatgatatcagtgcggcaaaggacaggcacaagaagaatcttctggaagttcagacctatatcagcatcctgcagcagatcatccacaccactcctccagcatccattgtgacgagtgggatgagggaggagaagctcctgacggagcgggaggtggccgccctgcggagtcagctggaggagggccgggaggtgctctcccacctgcaggcgcagagagtggagctgcaggcacagacaacaactctggaacaagctattaaaagtgcccatgagtgttatgacgatgagattcagctttataacgagcagattgagacactgcgcaaggagattgaggagacagagcgggtcctggagaagtcttcttacgactgccggcagctggcggtcgcccagcaaaccctgaagaatgagctggaccggtatcatcgtatcatcgagattgaaggcaacaggctgacctctgccttcattgaaactcccattcccctgttcacccagagccatggagtctctctcagcactggatccggtgggaaagatcttaccagagctctgcaggatataacagcagcaaaaccaagacaaaaagccctccccaagaatgttccaaggagaaaagagattataacaaaagacaaaaccaacggagctctggaagatgcaccattaaaaggtttggaagacacaaggctggtacaggtggtacttaaagaggaaagtgaatctaagtttgaatcagaaagtaaagaagtaagtcccctgacacaagaaggggctccagaggatgtgcctgatggagggcagataagcaaaggctttgggaaactatacaggaaggtcaaggagaaagtgagaagccccaaagagcctgagacccccactgagctctacaccaaagagcggcacgtgctggtcacaggggatgccaattacgtggaccctagattctatgtctcctccatcacagctaaaggtggggtggctgtttctgttgcagaagactctgtgctttatgacggccaggtggagccctctcctgagtcacccaagccccctttagagaatgggcaggtgggtctgcaggagaaagaagatggacaaccaattgaccagcagcctatagacaaggagattgagccagatggtgcagagctggaaggccctgaagagaaacgtgagggtgaggagcgggacgaagggtccaggagaccctgtgccatggtcacacccggtgcagaggaaccgtctatacctgagcctccaaagcctgcggctgatcaggatggagctgaggtgcttgggactaggagcagaagcctgccagaaaaaggccctcccaaggctttggcctataagacagtggaagtggtggaatctatcgagaagatttccacggagagcattcagacatatgaagaaaccgctgtgatcgtggagaccatgattggaaagacaaagtcagacaagaagaaatcaggagagaagagctcttaaaatgcccaggcttgatgggataaaatgtatttggggccactgtaggggtaatgctttgatattttagagcaaatgataaaagggtgagggttcctgtttggattagaccatagttgacccatctggcattgccaacgaagccttcattaaaatgttttctttgcttgcaaaaaaaaaaaaaa

SEQ ID NO: 22776 - DNA, 2078 bp, Homo Sapiens
ctgttgattttttggagaaatatgggagaaacagtggaatatttttatgacatttttaggaaatcacctggcttggttggtagtcccacactgactttccttatgataattctacagatggaggtgactcgagcagtgatgaggataaagaataacatgaaactcctgtggaagtagaactcatgactcaggttgaccaagaggatatcactcttcagagtggcagagatgaactaaatgaggagctcattcaggaagaaagctctgaagacgaaggagaatatgaagaggttagaaaagatcaggattctgttggtgaaatgaaggatgaaggggaagagacattaaattatcctgatactaccattgacttgtctcaccttcaaccccaaaggtccatccagaaattggcttcaaaagaggaatcttctaattctagtgacagtaaatcacagagccggagacatttgtcagccaaggaaagaagggaaatgaaaaagaaaaaacttccaagtgactcaggagatttagaagcgttagagggaaaggataaagaaaaagaaagtactgtacacattgaaactcatcagaacacaagcaaaaatgttgcggctgtgcagccaatgaaacgaggacaaaagagtaaaatgaaaaaaatgaaagaaaaatacaaagaccaggatgaagaagaccgtgaacttatcatgaagttgctggggtctgcaggttcaaacaaagaagaaaaagggaagaaggggaagaaaggaaaaacaaaggacgaacctgtgaagaaacagccccagaaacctagaggtggacagagggtctctgacaacattaagaaagaaactccgttccttgaggttataactcatgagttacaagactttgctgtagatgatccacatgatgacaaggaagagcaagatctggatcaacagggaaatgaggaaaacctatttgattctttgacaggccagccacatcctgaagatgtactactgtttgccattccaatatgtgccccttacaccaccatgacaaactacaaatataaagtgaaacttactcctggagtgcagaaaaagggaaaagctgcaaaaacagccttgaatagtttcatgcattccaaagaagcaacagcaagagaaaaagacttattccgcagcgtaaaggacacagatttatcaagaaacattcctggcaaagtgaaaagtgtctgcacccaatcttctgaacgtaaaaaggaaatagctgaaatgaaattctaaaatatttgagaagagccaattttatagccttttggaagttcaaagatgaaagcaccatgtatcaggatttccgcattataaaaatgaactaaacattgccttgctatattcaccaaaaggacttaattcttgtttttttcccagttttatatagaggaaacactgtctatgataggatttccaaaagtatttgtggacagttaaatgctaattatatacatctgtagttattctacattttcttgaaatttgggaggttaataccaagtattcatttcatgatgtaaagaaactgaacagtgaagtggcttgattgcttaaactattgacttggtaagtctactgtatataacatctaatatatatattacaggccaaatgaactaaacattgccttgctatattcaccaaaaggacttaattcttgtttttttcccagttttatatagaggaaacactatgataggatttcctaaagtatttgtggacagttaaatgctaattatatacatctgtagttattctacattttcttgaaatttgagaggttaataccaagtattcatttcatgatgtaaagaaactgaacagtgaagtggcttgattgcttaaactattgacttggtaagtctactgtatataacatctaatatatatatattataggccagctacaaggggtttaaatatttaggattgtgtcttgaaaactaagtattggagtggattttcttctgctttcattgatacttgtcagaaaaaaatattagaccaaaatgtaaaatataagtaataattctcatgaaa

SEQ ID NO: 22777 - DNA, 3966 bp, Homo Sapiens
atgcatagagctgttctaattaatggagagacaattcacagttcatttattcattgactcaacaaatatttatggaacaacaaatatgtgttgttttaggcattccgagatcaggaagtaaaaaatataaaaatctctgttatcatggaatttacagtctaatgatcaaagggaggcaataaataaataaatttatttatttaaaaactgtattcaaagagtgataagtgataagaagaaagatgttagggaagtgggaggagatataaatgtactacaagactggtcaggaaagaccacacaaaaattgagtaaacacacaaaaggtttgaagaagtaatcaaaagagaatacagaggaagtgcattccatccagtgggaaggggaagaacaaaggatctgaggcaggaatgcaatgtaatgactaattactatttgtgaggctctggtccacatggatgaggaaaaatcatgcctgttttgttgaaactccaaatctggttggggaagaagttactaatcaaataaccacccaaataaatacataatcatatataatgataaattgataaattctgtaaagggaaaatacaggtcactatgaggaggtacaatgcaaagttctgagtgattctgaagagtcaaaaatatcttccctgaatagttgatacctatattgagatctgaaggctgcatagaatttaaccagataaaagagaaaagaaagcactccaacatcataaccagcatgtgttagttaaaagtgatgctgagaaagagcttgagttagattgaagtagaatcagtgatagaaaataacagccgaaaacaaacaaaaaggggacatagtgacaatttctcctgggttattttggctggaaccaacttccattatccagaagctgataaaaaagctttgggaaacatgaacaaaacattgatgaaatgttggaaaccagttgaaacacagtaaaaccaactgggtaaaataggaccacttctcttcatctacactgggatttgtcaagaagtgaactatgacaatacatcaatttttgctactgtttctattctgggtatgcctgccacatttctgctctccagaaataatgttcagaaggacgcctgtgccacagcgaagaattttaagttcacgtgtaccaaggagtgatggcaaaattctccatcgtcaaaaacgtggttggatgtggaatcaatttttcttacttgaagaatatacaggatctgattatcagtacgtaggcaagctacattcagaccaagataaaggagatggatcactcaaatatatcttatctggagatggagctggtactctttttattattgatgaaaaaacaggtgatattcatgccacaaggcgaattgatagggaggaaaaggccttttatactctacgcgcacaagctattaacagaagaactctgaggccagtagagccagagtcagagtttgtgatcaaaattcatgatatcaatgacaatgagccaacgttcccagaagaaatctatacagctagtgttcccgaaatgtctgttgtaggtacttctgtggtgcaagtcacagctacagatgccgatgacccttcatatgggaacagcgccagagtcatttacagcatacttcaagggcagccctatttctctgtggagcctgaaacaggtatcatcaggactgctttaccgaacatgaacagagaaaacagagagcaataccaagtggtcatccaggccaaagacatgggcggccagatgggaggcttatcggggacaaccactgtgaacatcacgctgacagatgtcaatgacaacccaccacgtttcccccagaacactattcatcttcgagttcttgaatcctccccagttggcacagccattggaagtgtcaaagcaactgatgctgacactgggaaaaatgctgaagtagaataccgaattattgatggtgacggtactgatatgtttgacatcgtgactgagaaggacacacaggaaggcatcatcactgtgaaaaagccactcgactatgagagccgaagactttatactctgaaagtcgaagcagaaaacacccatgtagatccccgtttttattacctaggaccatttaaagatactaccatagtgaaaatctctatagaagatgtggatgaacctcctgtttttagtaggtcctcctatctgtttgaagttcatgaagatattgaagtgggcacaatcattggtactgtaatggcaagggacccagattctatttccagccccattagattttccttggatcgccatactgaccttgacagaatctttaacattcattcaggaaatggatctctttatacatcaaaacctcttgaccgtgaactatctcagtggcataatcttactgttattgctgctgaaatcaacaatcccaaagagacaacacgcgtggctgtttttgtgagaattttggatgctaatgacaatgccccacagtttgctgtgttctatgacacttttgtatgtgaaaatgccagaccagggcagctaatacagactataagtgcagtagacaaagatgaccctttaggtggacagaaattttttttcagtttagctgctgtcaatccaaacttcacagtacaggataatgaagataatactgccagaatcttaaccagaaaaaatggattcaatagacatgaaatcagtacctatctcttgcctgtggtgatatcagacaatgattacccaattcagagcagcacaggcacactgaccattcgagtgtgtgcttgtgacagccaaggcaacatgcaatcctgcagtgctgaagccctgctcctccctgccggcctcagcactggggccttgatcgccatcctcctctgcatcatcattctactggttatagtagtactgtttgcagctctgaaaagacagcgaaaaaaagagcctctgatcttgtcaaaagaagatatcagagacaacattgtgagctataacgatgagggtggtggagaggaggacacccaggcctttgatatcggcaccctgaggaatcctgcagccattgaggaaaaaaagctccggcgagatattattccagaaacgttatttattcctcggaggactcctacagctccagataacacggacgtccgggatttcattaatgaaaggctaaaagagcatgatcttgaccccaccgcacccccctacgactcacttgcaacctatgcctatgaaggaaatgattccattgctgaatctctgagttcattagaatcaggtactactgaaggagaccaaaactacgattacctccgagaatggggccctcggtttaataagctagcagaaatgtatggtggtggggaaagtgacaaagactcttaacgtaggatatatgttctgttcaaacaagagaaagtaactctacccatgctgtctccacttcacaatatttgatattcaggagcattttcctgccagtcagcacaattttttttctcatttacttcttaatttgttcattaattacattaattctttcctgtaggatgtctcatggaatatatatgacattttatttaatcacttccaagagccaaagctatggaaatacagtgttgtccatcttagtaaataaaagataatttcagaaacatgaacaggatagttctcccttaagcaacctcacaaacaagccgcttctgttaggtacatgtcctgcccttgcaaatgaagcttttaaaaaggtgaagaaaaattttacagtatatcctgttctgtacattaaattaaaaaaacaaaaatgtacatgtgatgttagtaggtgtgatatgcaacctggtatacagacatttgtgcaatttcatttcatcaaattctatctgctaatgttttatatttatatttttgtatttatttttaaaaaaataaaccagtttttacaact

SEQ ID NO: 22778 - DNA, 2135 bp, Homo Sapiens
ggcacgagggtaaggccgttttcttttcccattcgctcatctgccaggaaaagggacttgccgttggcgcttcggcctcttgttcattgagaaaaaagaggaaatactccgcgtgcgcttgtagaaggggagtcgtctccagctccgaaccccggagtgttcatcagcggggaatctggctccgaattctctttttttctcccgccgattgctcggaagttggtctaaagcagaggttggaaagaaaggaaaaaagtttgcatcgagactggatttatttgcacatcgcagaaagaagagaatccaagggagaggggttggtgcaaagccgcgatcacggagttcagatgtgttctaagcctgctggagtgaccacacttccaagacctgatggaggccagagctcagagtggcaacgggtcgcagcccttgctgcagacgccccgtgacggtggcagacagcgtggggagcccgaccccagagacgccctcacccagcaggtacatgtcttgtctctggatcagatcagagccatccgaaacaccaatgagtacacagaggggcctactgtcgtcccaagacctgggctcaagcctgctcctcgcccctccactcagcacaaacacgagagactccacggtctgcctgagcaccgccagcctcctaggctccagcactcgcaggtccattcttctgcacgagcccctctgtccagatccataagcacggtcagctcagggtcgcggagcagtacgaggacaagtaccagcagcagctcctctgaacagagactgctaggatcatccttctcctccgggcctgttgctgatggcataatccgggtgcaacccaaatctgagctcaagccaggtgagcttaagccactgagcaaggaagatttgggcctgcacgcctacaggtgtgaggactgtggcaagtgcaaatgtaaggagtgcacctacccaaggcctctgccatcagactggatctgcgacaagcagtgcctttgctcggcccagaacgtgattgactatgggacttgtgtatgctgtgtgaaaggtctcttctatcactgttctaatgatgatgaggacaactgtgctgacaacccatgttcttgcagccagtctcactgttgtacacgatggtcagccatgggtgtcatgtccctctttttgccttgtttatggtgttaccttccagccaagggttgccttaaattgtgccaggggtgttatgaccgggttaacaggcctggttgccgctgtaaaaactcaaacacagtttgctgcaaagttcccactgtcccccctaggaactttgaaaaaccaacatagcatcattaatcaggaatattacagtaatgaggattttttctttctttttttaatacacatatgcaaccaactaaacagttataatcttggcactgttaatcgaaagttgggatagtctttgctgtttgcggtgaaatgctttttgtccatgtgccgttttaactgatatgcttgttagaactcagctaatggagctcaaagtatgagatacagaacttggtgacccatgtattgcataagctaaagcaacacagacactcctaggcaaagtttttgtttgtgaatagtacttgcaaaacttgtaaattagcagatgacttttttccattgttttctccagagagaatgtgctatatttttgtatatacaataatatttgcaactgtgaaaaacaagttgtgccatactacatggcacagacacaaaatattatactaatatgttgtacattcggaagaatgtgaatcaatcagtatgtttttagattgtattttgccttacagaaagcctttattgtaagactctgatttccctttggacttcatgtatattgtacagttacagtaaaattcaacctttattttctaattttttcaacatattgtttagtgtaaagaatatttatttgaagttttattattttataaaaaagaatatttattttaagaggcatcttacaaattttgccccttttatgaggatgtgatagttgctgcaaatgaggggttacagatgcatatgtccaatataaaatagaaaatatattaacgtttgaaattaaaaaaaaaaaaaaaaaa

SEQ ID NO: 22779 - DNA, 3816 bp, Homo Sapiens
aggccgctgactggtgtagagcccgccagaatgaacaggaagaaaggagacaagggctttgaaagcccaaggccatataaattaacccatcaggtcgtctgcatcaacaacataaatttccagagaaaatctgttgtgggatttgtggaactgactatatttcccacagttgcaaacttgaatagaatcaagttgaacagcaaacagtgtagaatataccgagtaaggatcaatgatttagaggctgcttttatttataatgacccaaccttggaagtttgtcacagtgaatcaaaacagagaaacctcaattatttttccaatgcttatgcagctgcagttagtgctgtggaccctgatgcaggaaatggagaactttgcattaaggttccatcagagctatggaaacacgttgatgagttaaaggtcctgaagatacacatcaatttttctttggatcagcccaaaggaggtcttcattttgtggtacccagtgtagagggaagtatggcagagagaggtgctcatgttttctcttgtgggtatcaaaattctacaagattttggttcccttgtgttgattcatactctgaattgtgtacatggaaattagaatttacagtagatgctgcaatggttgctgtttctaatggcgatttggtggagacagtgtatactcatgatatgaggaagaaaactttccattatatgcttaccattcctacagcagcgtcaaatatctccttggccattggaccatttgaaatactggtagatccatacatgcatgaggttactcatttttgtttgccccaacttcttccattgctgaaacataccacatcataccttcatgaagtctttgaattttatgaagaaattcttacatgtcgttacccatactcctgttttaagactgtcttcattgatgaggcttatgttgaagtggctgcttatgcttccatgagcatttttagcacaaatcttttacacagtgccatgattatagatgagacacctttgactagaaggtgtttagcccaatccttggcccagcagttttttggttgtttcatatctagaatgtcttggtctgatgaatgggtgctgaagggaatttcaggctatatctatggactttggatgaaaaaaacttttggtgttaatgagtaccgccattggattaaagaggagctagacaaaatagtggcatatgaactaaaaactggtggggttttactacatcccatatttggtggaggaaaagagaaggataatccggcttcccatctacacttttcaataaagcatccacatacactgtcctgggaatactacactatgtttcagtgtaaagcccaccttgtgatgagattgattgaaaataggatcagtatggaatttatgctacaagttttcaataaactgctaagtctggctagtactgcttcatctcagaagttccagtcacatatgtggagtcagatgttggtttccacatctgggtttttaaaatccatttcaaatgtctctggcaaagatattcagccgttaataaagcagtgggtagatcagagtggagtggtaaaattttatggaagttttgcatttaatagaaaacgaaatgtcttggaactggaaataaaacaggactatacatctcctggaactcagaaatacgtgggaccacttaaagtgacagtgcaggagttagatggatccttcaatcatacactgcaaattgaagaaaacagccttaaacatgatataccctgccattccaaaagtagaaggaataaaaagaaaaaaatcccactgatgaatggagaagaagttgatatggatctttctgcaatggatgctgattcccctttgctgtggataaggatagacccagatatgtcagtattgaggaaggtagaatttgagcaagctgattttatgtggcagtatcagctccgctatgagagagatgttgttgcacagcaggaatccattttggctttggaaaaattccctactccagcatctcggcttgcactcactgatatattagaacaagagcagtgtttctacagagtaagaatgtcagcttgcttctgtcttgcaaagattgcaaattcaatggtgagcacatggacaggaccaccagccatgaagtcactcttcactaggatgttttgttgtaaaagttgtccaaacattgtgaaaacaaacaactttatgagctttcaaagctattttctacagaagactatgccagttgcaatggctttattaagagatgttcataatctttgtcctaaagaagtcttaacgtttattttagacttaatcaagtacaatgacaacgggaaaaataagttttcagataactattatcgtgcagaaatgattgatgccctggccaactctgttacacctgcagtcagtgtgaataatgaagttagaactttggataacttaaatcctgatgtgcgactcattcttgaagaaatcaccagatttttgaatatggaaaaacttcttccgagttacaggcataccatcactgtcagttgtttgagagccatacgggtacttcagaagaacggacatgtgccaagtgatccagctctttttaaatcttatgctgaatatggccactttgtggacattaggatagcagctttggaagcagttgttgattatactaaagtggacagaagttatgaagaactgcaatggctacttaatatgattcagaatgaccctgtaccctatgtaaggcataagattctcaacatgttgactaagaacccaccatttactaagaacatggagtctcccttatgcaatgaagccctggtagatcaactttggaaacttatgaattctggtacttcacatgactggaggttacggtgtggtgctgtggacttgtacttcacactttttggcctcagtagaccttcctgtttacccttgccagagcttgggttggttcttaatctaaaggagaaaaaagctgtcttgaatcctaccataattccagagtcagtagcaggcaaccaagaagctgcaaataatccaagcagtcacccacagctagttggatttcagaaccctttttccagttctcaagatgaggaggagattgatatggatactgttcatgatagccaggccttcatttcccatcatttaaacatgcttgaaaggccgtcaactccagggctctcgaaatatcggccagctagctcccgatctgctttaataccccagcactcagcaggctgtgacagcacacccaccacaaaaccccagtggagtttggaacttgcacggaagggaacaggtaaagaacaagcacctttggagatgagtatgcatccagcggcaagcgctccactctcagtctttactaaggaatctacagcctccaaacacagtgaccaccatcaccaccatcaccatgagcacaagaaaaagaagaagaagcataaacataagcacaaacacaagcataagcatgacagtaaagaaaaggacaaggagcctttcactttctccagccctgccagtggcaggtctattcgttctccttccctttcagactgagaaggggacaaaaagacctttcctttcatgtccagaagaatgtatgtaactaaagctttgtcctcctgtgaagaattataaaagggaggggggaaaggattcgcctctcctacagaaattctgaattcatttaagttctaagcatttgatttatgttatttatacagttgggatctaattagaaaaatgtgttttgtagttctggataaactattt

SEQ ID NO: 22780 - DNA, 5482 bp, Homo Sapiens
cgggcagcgcagcccgcagaggcgctgcggcccgtgcagccccggaggcccctcgcggagaaggcggcggcggaggagaggccgagttaccgcccgccgcccgcgcccccccaaccccgccgccgccgccgccgccgccactgccccccctccccgcggcgccgcatcttgaatggaaacatggcggtgccggctcggacctgcggcgcctctcggcccggcccagcgcggactgcgcgcccctggcccggctgcggcccccaccctggccccggcacccggcgcccgacgtccgggcccccgcgcccgctgtggctgctgctgccgcttctaccgctgctcgccgcccccggcgcctctgcctacagcttcccccagcagcacacgatgcagcactgggcccggcgtctggagcaggaggtcgacggcgtgatgcggatttttggaggcgtccagcagctccgtgagatttacaaggacaaccggaacctgttcgaggtacaggagaatgagcctcagaagttggtggagaaggtggcaggggacattgagagccttctggacaggaaggtgcaggccctgaagagactggctgatgctgcagagaacttccagaaagcacaccgctggcaggacaacatcaaggaggaagacatcgtgtactatgacgccaaggctgacgctgagctggacgaccctgagagtgaggatgtggaaagggggtctaaggccagcaccctaaggctggacttcatcgaggacccaaacttcaagaacaaggtcaactattcatacgcggctgtacagatccctacggacatctacaaaggctccactgtcatcctcaatgagctcaactggacagaggccctggagaatgtgttcatggaaaaccgcagacaagaccccacactgctgtggcaggtcttcggcagcgccacaggagtcactcgctactacccggccaccccgtggcgagcccccaagaagatcgacctgtacgatgtccgaaggagaccctggtatatccagggggcctcgtcacccaaagacatggtcatcatcgtggatgtgagtggcagtgtgagcggcctgaccctgaagctgatgaagacatctgtctgcgagatgctggacacgctgtctgatgatgactatgtgaatgtggcctcgttcaacgagaaggcacagcctgtgtcatgcttcacacacctggtgcaggccaatgtgcgcaacaagaaggtgttcaaggaagctgtgcagggcatggtggccaagggcaccacaggctacaaggccggctttgagtatgcctttgaccagctgcagaactccaacatcactcgggccaactgcaacaagatgatcatgatgttcacggatggtggtgaggaccgcgtgcaggacgtctttgagaagtacaattggccaaaccggacggtgcgcgtgtttactttctccgtggggcagcataactatgacgtcacaccgctgcagtggatggcctgtgccaacaaaggctactattttgagatcccttccatcggagccatccgcatcaacacacaggaatatctagatgtgttgggcaggcccatggtgctggcaggcaaggaggccaagcaggttcagtggaccaacgtgtatgaggatgcactgggactggggttggtggtaacagggaccctccctgttttcaacctgacacaggatggccctggggaaaagaagaaccagctgatcctgggcgtgatgggcattgacgtggctctgaatgacatcaagaggctgacccccaactacacgcttggagccaacggctatgtgtttgccattgacctgaacggctacgtgttgctgcaccccaatctcaagccccagaccaccaacttccgggagcctgtgactctggacttcctggatgcggagctagaggatgagaacaaggaagagatccgtcggagcatgattgatggcaacaagggccacaagcagatcagaacgttggtcaagtccctggatgagaggtacatagatgaggtgacacggaactacacctgggtgcctataaggagcactaactacagcctggggctggtgctcccaccctacagcaccttctacctccaagccaatctcagtgaccagatcctgcaggtcaagtattttgagttcctgctccccagcagctttgagtctgaaggacacgttttcattgctcccagagagtactgcaaggacctgaatgcctcagacaacaacaccgagttcctgaaaaactttattgagctcatggagaaagtgactccagactccaagcagtgcaacaacttccttctgcacaacctgatcttggacacgggcatcacgcagcagctggtagagcgtgtgtggagggaccaggatctcaacacgtacagcctactggccgtgttcgctgccacagacggtggcatcacccgagtcttccccaacaaggcagctgaggactggacagagaaccctgagcccttcaatgccagcttctaccgccgcagcctggataaccacggttatgtcttcaagcccccacaccaggatgccctgttaaggccgctggagctggagaatgacactgtgggcatcctcgtcagcacagctgtggagctcagcctaggcaggcgcacactgaggccagcagtggtgggcgtcaagctggacctagaggcttgggctgagaagttcaaggtgctagccagcaaccgtacccaccaagaccagcctcagaagtgcggccccaacagccactgtgagatggactgcgaggttaacaatgaggacttactctgtgtcctcattgatgatggaggattcctggtgctgtcaaaccagaaccatcagtgggaccaggtgggcaggttcttcagtgaggtggatgccaacctgatgctggcactctacaataactccttctacacccgcaaggagtcctatgactatcaggcagcctgtgcccctcagccccctggcaacctgggtgctgcaccccggggtgtctttgtgcccaccgttgcagatttccttaacctggcctggtggacctctgctgccgcctggtccctgttccagcagcttctctacggcctcatctaccacagctggttccaagcagaccccgcggaggccgaggggagccccgagacgcgcgagagcagctgcgtcatgaaacagacccagtactacttcggctcggtaaacgcctcctacaacgccatcatcgactgcggaaactgctccaggctgttccacgcgcagagactgaccaacaccaatcttctctttgtggtggccgagaagccgctgtgcagccagtgcgaggctggccggctgctgcagaaggagacgcactgcccagcggacggcccggagcagtgtgagctagtgcagagaccgcgataccggagaggcccgcacatctgcttcgactacaacgcgacagaagatacctcagactgtggccgcggggcctccttcccgccgtcgctgggcgtcctggtctccctgcaactgctgctcctcctgggcctgccgccccggccgcagcctcaagtcctcgtccacgcctctcgccgcctctgagcaccctgccccaccccacctccactcccacctcacccggcctcttcgcctttcccaccctcctgccccacactccccgccttagagcctcgtccctccctcactgaaggacctgagctggccaggccctgagagtctggtctgcgccttgggatggggagtcccaaagcgggacgccgcaggtgtttggcacccaaatcacatctcacctccgaactgttcaagtgtccccagacccttcttgcctgctgggctccccccagtgggatgggacagggaggccacacgcactggtgccaaaaccaggcctctgctgccgcccttcctggaggctgcctatgttgggggggaccctgcctcagctgacccggcctctctgccccacccaagcccaaacttggtttctgtgagaatagtggaggaaggtgagatggccagtttgaagcctgtgcctcccagcttaaatcctagcaggagagaggctctggggcagcccccatgggctcctgcccctttcaggcctacagccacatccccaagcccaccaggtgtcaggatagtcacagtgataccagttcagacactaccccatatacacctggaacattgaggatggaaactggactcacattcgacataccccactgggcacacgcacaaacacacacactatggggtggggtgggtgtaggggcttacaaagccttacacagggcgaggggttggtgggagggttggcacctgcacactccatctcctgctcaccacctgcctctaatctgagctgcagcctggctggtcctcccatttctaaagctgaatgtcaaacagtgccaaatgctggggcagggggtgaagaaccctctgtcccacccctagccaccagtgtcctccaagtgccccctcacctctccaggtgctcattgtaaccatttctcactagtgtcaggcccccagtgggaccacatgccactgcctgcacctttcggcagaggaacccccaccagacatcaccctttgccttagcaggggtgactttgtctctcctggctgggccatccttccgccaatctggcccttacacactcaggcctgtgcccactccctatctccttcccacccctacacacacactccctgcttgcaggaggccaaactgtccctcccttgctgaacacacacacacacacacacacacaggtggggactgggcacagctcttcacaccattcattctggtcatttcccccaaaggcatcccagcctgggggccagtggggaactgagggcaaggggatatagtgatggggctcagatggactgggaggagggggagggtgatgcattaattaatggcttcgttaattaatgtcatgttgcttgtcgctttctcagtgtgtgtgtgtggtccatgcccactgctggtgccagggtgggtgtccatgtgcacccggcctggatgccagctgtgtccttcgggggcgtgcgtgtaactgtagtgtagtcaggtgctcaatggagaatataaacatatacagaaaaatatatattttaagtttaaaaaacagaaaaacagacaaaacaatccccatcaggtagctgtctaacccccagctgggtctaatccttctcattacccacccgacctggctgcccctcaccttgggctgggggactggggggccatttccttttctctgccctttttttgttgttctattttgtacagacaagttggaaaaacaacagcgacaaaaaagtcaagaaactttgtaaaatatcgtgtgtgtgattccttgtaaaatattttcaaatggtttattacagaagatcagttattaaataatgttcatattttcacttc

SEQ ID NO: 22781 - DNA, 1861 bp, Homo Sapiens
ggtgctgggaggccttagaacgccgtggcgtgccgcaggacgcgacggctgcagaacatccgccgcaccgctgggggccaacgttgtcggaccgaggagtccgaggtggcgactgagtgagatacccagctgtgcggagctaggacgcggaacatcccagaggccagcatcaacatgtttccatccttggggaatgaccacgcaactgggcccagccctggtgctgggggtggccctgtgcctgggttgtggccagcccctaccacaggtccctgaacgccccttctctgtgctgtggaatgtaccctcagcacactgtgaggcccgctttggtgtgcacctgccactcaatgctctgggcatcatagccaaccgtggccagcattttcacggtcagaacatgaccattttctacaagaaccaactcggcctctatccctactttggacccaggggcacagctcacaatgggggcatcccccaggctttgccccttgaccgccacctggcactggctgcctaccagatccaccacagcctgagacctggctttgctggcccagcagtgctggattgggaggagtggtgtccactctgggctgggaactggggccgccgccgagcttatcaggcagcctcttgggcttgggcacagcaggtattccctgacctggaccctcaggagcagctctacaaggcctatactggctttgagcaggcggcccgtgcactgatggaggatacgctgcgggtggcccaggcactacggccccatggactctggggcttctatcactacccagcctgtggcaatggctggcatagtatggcttccaactataccggccgctgccatgcagccacccttgcccgcaacactcaactgcattggctctgggccgcctccagtgccctcttccccagcatctacctcccacccaggctgccacctgcccaccaccaggcctttgtccgacatcgcctggaggaggccttccgtgtggcccttgttgggcaccgacatcccctgcctgtcctggcctatgtccgcctcacacaccggagatctgggaggttcctgtcccaggatgaccttgtgcagtccattggtgtgagtgcagcactaggggcagccggcgtggtgctctggggggacctgagcctctccagctctgaggaggagtgctggcatctccatgactacctggtggacaccttgggcccctatgtgatcaatgtgaccagggcagcgatggcctgcagtcaccagcggtgccatggccacgggcgctgtgcccggcgagatccaggacagatggaagcctttctacacctgtggccagacggcagccttggagattggaagtccttcagctgccactgttactggggctgggctggccccacctgccaggagcccagcctgggcctaaagaagcagtataaagccagggcccctgccactgcctcttcttttccctgctgccacttttccagtcctggaactactctgtcccactcttgctctattcagtttacagtcaaccctcccaagcacacaccccgcttcccttggaatccctgaggggtagaaggggccagaaaaaacgcttataaaaccagaggccctctgagatcatgtgagtcctccatggcaaggaagcagttccagggagagtcaggttccagctagttagggctgccagcctagggctttgtgcctacacctcactaagcccatggagaggtcacagatgggccgtgcacgggcagatgggccccaaaaaatcttggcgaaggtcggtaaagtgctaagctgttgtctgcactctttcatcataaagtcacttttttccactgc

SEQ ID NO: 22782 - DNA, 5632 bp, Homo Sapiens
gacaaagagaactaatgctttgtgctgattcatatttgaatcgaggcattgggaaccctgtatgccttgtttgtggaaagaaccagtgacaccatcactgagcttcctaaaagttcgaagaagttagaggactatacactttcttttgaacttttataataaatatttgctctggtttttggaacccagggctgttagaggggtgagtgacaagtcttacaagtggccttattccaactccagaaattgcccaacggaactttgagattatatgcaatcgaaagtgacaggaaacatgccaactcaatccctcttaatgtacatggatgggccagaagtgattggcagctctcttggcagtccgatggagatggaggatgccttgtcaatgaaagggaccgctgttgttccattccgagctacacaagaaaaaaatgtcatccaaatcgaggggtatatgcccttggattgcatgttctgcagccagaccttcacacattcagaagaccttaataaacatgtcttaatgcaacaccggcctaccctctgtgaaccagcagttcttcgggttgaagcagagtatctcagtccgcttgataaaagtcaagtgcgaacagaacctcccaaggaaaagaattgcaaggaaaatgaatttagctgtgaggtatgtgggcagacatttagagtcgcttttgatgttgagatccacatgagaacacacaaagattctttcacttacgggtgtaacatgtgcggaagaagattcaaggagccttggtttcttaaaaatcacatgcggacacataatggcaaatcgggggccagaagcaaactgcagcaaggcttggagagtagtccagcaacgatcaacgaggtcgtccaggtgcacgcggccgagagcatctcctctccttacaaaatctgcatggtttgtggcttcctatttccaaataaagaaagtctaattgagcaccgcaaggtgcacaccaaaaaaactgctttcggtaccagcagcgcgcagacagactctccacaaggaggaatgccgtcctcgagggaggacttcctgcagttgttcaacttgagaccaaaatctcaccctgaaacggggaagaagcctgtcagatgcatccctcagctcgatccgttcaccaccttccaggcttggcagctggctaccaaaggaaaagttgccatttgccaagaagtgaaggaatcggggcaagaagggagcaccgacaacgacgattcgagttccgagaaggagcttggagaaacaaataagggcagttgtgcaggcctctcgcaagagaaagagaagtgcaaacactcccacggcgaagcgccctccgtggacgcggatcccaagttacccagtagcaaggagaagcccactcactgctccgagtgcggcaaagctttcagaacctaccaccagctggtcttgcactccagggtccacaagaaggaccggagggccggcgcggagtcgcccaccatgtctgtggacgggaggcagccggggacgtgttctcctgacctcgccgcccctctggatgaaaatggagccgtggatcgaggggaaggtggttctgaagacggatctgaggatgggcttcccgaaggaatccatctggataaaaatgatgatggaggaaaaataaaacatcttacatcttcaagagagtgtagttattgtggaaagtttttccgttcaaattattacctcaatattcatctcagaacgcatacaggtgaaaaaccatacaaatgtgaattttgtgaatatgctgcagcccagaagacatctctgaggtatcacttggagagacatcacaaggaaaaacaaaccgatgttgctgctgaagtcaagaacgatggtaaaaatcaggacactgaagatgcactattaaccgctgacagtgcgcaaaccaaaaatttgaaaagattttttgatggtgccaaagatgttacaggcagtccacctgcaaagcagcttaaggagatgccttctgtttttcagaatgttctgggcagcgctgtcctctcaccagcacacaaagatactcaggatttccataaaaatgcagctgatgacagtgctgataaagtgaataaaaaccctacccctgcttacctggacctgttaaaaaagagatcagcagttgaaactcaggcaaataacctcatctgtagaaccaaggcggatgttactcctcctccggatggcagtaccacccataaccttgaagttagccccaaagagaagcaaacggagaccgcagctgactgcagatacaggccaagtgtggattgtcacgaaaaacctttaaatttatccgtgggggctcttcacaattgcccggcaatttctttgagtaaaagtttgattccaagtatcacctgtccattttgtaccttcaagacattttatccagaagttttaatgatgcaccagagactggagcataaatacaatcctgacgttcataaaaactgtcgaaacaagtccttgcttagaagtcgacgtaccggatgcccgccagcgttgctgggaaaagatgtgcctcccctctctagtttctgtaaacccaagcccaagtctgctttcccggcgcagtccaaatccctgccatctgcgaaggggaagcagagccctcctgggccaggcaaggcccctctgacttcagggatagactctagcactttagccccaagtaacctgaagtcccacagaccacagcagaatgtgggggtccaaggggccgccaccaggcaacagcaatctgagatgtttcctaaaaccagtgtttcccctgcaccggataagacaaaaagacccgagacaaaattgaaacctcttccagtagctccttctcagcccaccctcggcagcagtaacatcaatggttccatcgactaccccgccaagaacgacagcccgtgggcacctccgggaagagactatttctgtaatcggagtgccagcaatactgcagcagaatttggtgagccccttccaaaaagactgaagtccagcgtggttgcccttgacgttgaccagcccggggccaattacagaagaggctatgaccttcccaagtaccatatggtcagaggcatcacatcactgttaccgcaggactgtgtgtatccgtcgcaggcgctgcctcccaaaccaaggttcctgagctccagcgaggtcgattctccaaatgtgctgactgttcagaagccctatggtggctccgggccactttacacttgtgtgcctgctggtagtccagcatccagctcgacgttagaaggaaaaaggcctgtgtcatatcaacacttatctaacagcatggcacaaaagagaaactatgagaattttattgggaatgcacattatcgaccaaatgacaaaaaaacttgattcactaattagggggaaaaaaggtcttggtggatgtcagtgcttactccccatgaaattaaattttacttcatcctttgagaagcgaatggtgaaagctactgaaataagctgtgattgtactgtacataaaacatatgaggaatctgcaaggaacactacagttgtgtaaagttgttctgttaacttttgtaccaaatagcaatacaaactagttggaacagttggaacttacatacatggggactggaaatctctattttgtccctgaataatatttttcttagaattgaccaaataagaagtggaatttttgcatacttgagcgctgctgaaaagaaatcatttgggttgggtggggcgggatgggggaaaagtatataatgcttgcacctcaggtaaaaatctgtaaatatctaagttgtaaacctgcttgttcaaatactgtgtgtattccttttctctaatgcagctcatcacttggagcagtttctgctattgtgctctttcatttaaaatgtatgtttttttttttttaaactgtcaatgattttgtattatgttgaatccacccaaatctattgttgtcttaaaattgttaatggaagtattgaccctctatgatatgtgctgcagatatcgaggtcagccattcggaagctggcagcattttatcgcaactttgagcatctcagatggggaaggcaccttcttcctcgcctctccagattgtcctggaacctccaggatccttgactgagggcgttgggatggcttgtaggatttttaagagagtgtgtctacagacaagcattttctctgtagagcagccacacgttgtataaacataaactgtatgtgcagttatttaaatttgtttctgtcaaattaatcatttttgttggacgattcagtggcgggggggttttgcctaaattagtatataaaaacaaaaatgctaaattatatctgtgaattgcaggtattggggaacagttttaagggaaattttggggggaacattttaggtttgtatttggtagtcttaatgtatctggcatttgggtgaactgtggacatactagagttgattatagacacattgattttgaataaggaactgctggccgagcccgctgggagtctagaaagagaaaatctgtttctagacctcagttattttcccatttttggttgttttgaagcagtaacatttttctcagtgcacatgcaatttgggttttagagaagatggccaccagctggcttcctagatattttaaacttttgttctttaatatgctgtccatggctgagtttattagtacatgggcttagtgaccacaaaatattttattaagaaactgtttcaaaaataaatttgcactgttcatttttctggcctcgctgttctccatagagcaagggtaatcctagaaaaaattttttttttttaaattatgcaacgtaagatgtcctccttgatagaagtcttagctcctgtgttacaagggagaactcatttgagatcagtctgttggcattgcaatgaagtgctttgtatcaggaaagtgtacactattgaccttttttcctgttcacaagctgagccatatgtacataatctagattttgttttcatagttttgcacttttatagcctatttttgaagattaacacatttgcaagatgattgactcaatctttgcctaatccaatgagtgttacagagagcttgctgtgactagaaccataaatcttaaagggggtatgtgataatagagggctggaatttaaacctgtatttaaaaaaaagaatcaccaaatctatttgaaaacaagtcgatttgtattatgctggaattttttgggctttcagatttctctttttaaccacatttctgaatgtataaaaataccaattattttcctacagccctttgtacttcaaaatatgtttttgtgtccatcagtattaactattggtatactactggttttatatttttttttctttgagacaacagtacatataatagaggtacaattcgttggatttttgtttatgtatttatttcattccagtttgatttattttaattgttgatacttaagttgtcaaacagtagacattacgtgttttatttatgatatatttcagcttaaagttatgttattatatgtggaagtgtaaatatagatttggtgttttg

SEQ ID NO: 22783 - DNA, 2813 bp, Homo Sapiens
ctccaccgacagccaggcactgggcagcacgcactggagacccaggaccctgtgcaggagcagctccgggtgacacgaggggactgaagatactcccacaggggctcagcaggagcaatgggtaaccaaatgagtgttccccaaagagttgaagaccaagagaatgaaccagaagcagagacttaccaggacaacgcgtctgctctgaacggggttccagtggtggtgtcgacccacacagttcagcacttagaggaagtcgacttgggaataagtgtcaagacggataatgtggccacttcttcccccgagacaacggagataagtgctgttgcggatgccaacggaaagaatcttgggaaagaggccaaacccgaggcaccagctgctaaatctcgttttttcttgatgctctctcggcctgtaccaggacgtaccggagaccaagccgcagattcatcccttggatcagtgaagcttgatgtcagctccaataaagctccagcgaacaaagacccaagtgagagctggacacttccggtggcagctggaccggggcaggacacagataaaaccccagggcacgccccggcccaagacaaggtcctctctgccgccagggatcccacgcttctcccacctgagacagggggagcaggaggagaagctccctccaagcccaaggactccagcttttttgacaaattcttcaagctggacaagggacaggaaaaggtgccaggtgacagccaacaggaagccaagagggcagagcatcaagacaaggtggatgaggttcctggcttatcagggcagtccgatgatgtccctgcagggaaggacatagttgacggcaaggaaaaagaaggacaagaacttggaactgcggattgctctgtccctggggacccagaaggactggagactgcaaaggacgattcccaggcagcagctatagcagagaataataattccatcatgagtttctttaaaactctggtttcacctaacaaagctgaaacaaaaaaggacccagaagacacgggtgctgaaaagtcacccaccacttcagctgaccttaagtcagacaaagccaactttacatcccaggagacccaaggggctggcaagaattccaaaggatgcaacccatcggggcacacacagtccgtgacaacccctgaacctgcgaaggaaggcaccaaggagaaatcaggacccacctctctgcctctgggcaaactgttttggaaaaagtcagttaaagaggactcagtccccacaggtgcggaggagaatgtggtgtgtgagtcaccagtagagattataaagtccaaggaagtagaatcagccttacaaacagtggacctcaacgaaggagatgctgcacctgaacccacagaagcgaaactcaaaagagaagaaagcaaaccaagaacctctctgatggcgtttctcagacaaatgtcagtgaaaggggatggagggatcacccactcagaagaaataaatgggaaagactccagctgccaaacatcagactccacagaaaagactatcacaccgccagagcctgaaccaacaggagcaccacagaagggtaaagagggctcctcgaaggacaagaagtcagcagccgagatgaacaagcagaagagcaacaagcaggaagccaaagaaccagcccagtgcacagagcaggccacggtggacacgaactcactgcagaatggggacaagctccaaaagagacctgagaagcggcagcagtcccttgggggcttctttaaaggcctgggaccaaagcggatgttggatgctcaagtgcaaacagacccagtatccatcggaccagttggcaaacccaagtaaacaaatcagcacggttcccaccaggttctcctgccaccaagatgtgttctccttactccatctcctccccaaacacgctccatgtatatattcttctgatggccagcaaatgaaattctgcctagaaattaagcccgagctgttgtatattgaggtgtattatttacgtctctggtccagtcttttctggcaaataacagtaaagatggtttagcaggtcacctagttgggtcagaagagtcgatgatcaccaagcaggaaagggagggaatagaggaatgtgttcgggttaagtgatgaaaatggcagtggtggccgggcgtggtggctctcgcctgtaatctcagcactttgggaggccgaggcaggtggatcacctgaggtcaggagttcaagactagcctggccaacatcatgaaaccccgtctctactaaaaatacaaaaattagccaggcatggtggcacacacctgtagtcccagctactcgggagcccaacgcacgagaaccgcttgtacccaggaggtggaggttgcagtgagccgaagttgcaccattgcactccaccctgggcgacagagcaagattctatcaaaaaaaaaaggcagtggcaagtaagttatagaagagaaatgctgctagaaggaattaagcgttgtagtaaacgcgtgctcatcctctaagcttgaagaagggagacgaaaatccatttgtttaaattcacatctcaaggagggagaacccgggctgtgttgggtggttgccaatttcctagaacggaatgtgtggggtatagaaaaaggaatgaataagcgttgtttttcaaatagggtccttgtaagttattgatgagagggaaaagattgactggggagggcttaaaatgatttgggaaaacaattgcttttgaggctcagtgacaacggcaaagattacaactt

SEQ ID NO: 22784 - DNA, 1665 bp, Homo Sapiens
atgacccccatcctcacggtcctgatctgtctcgggctgagtctgggccccaggacccgggtgcaggcagaaaacctacccaaacccatcctgtgggccgagccaggtcccgtgatcacctggcataaccccgtgaccatctggtgtcagggcaccctggaggcccaggggtaccgtctggataaagagggaaactcaatgtcgaggcacatattaaaaacactggagtctgaaaacaaggtcaaactctccatcccatccatgatgtgggaacatgcagggcgatatcactgttactatcagagccctgcaggctggtcagagcccagcgaccccctggagctggtggtgacagcctacagcagacccaccctgtccgccctgccaagccctgtggtaacctcaggagtgaacgtgaccctccggtgtgcctcacggctgggactgggcaggttcactctgattgaggaaggagaccacaggctctcctggaccctgaactcacaccaacacaaccatggaaagttccaggccctgttccccatgggccccctgaccttcagcaacaggggtacattcagatgctacggctatgaaaacaacaccccatacgtgtggtcggaacccagtgaccccctgcagctactggtgtcaggcgtgtctaggaagccctccctcctgaccctgcagggccctgtcgtgacccccggagagaatctgaccctccagtgtggctctgatgtcggctacatcagatacactctgtacaaggagggggccgatggcctcccccagcgccctggccggcagccccaggctgggctctcccaggccaacttcaccctgagccctgtgagccgctcctacgggggccagtacagatgctacggcgcacacaacgtctcctccgagtggtcggcccccagtgaccccctggacatcctgatcgcaggacagatctctgacagaccctccctctcagtgcagccgggccccacggtgacctcaggagagaaggtgaccctgctgtgtcagtcatgggacccgatgttcactttccttctgaccaaggagggggcagcccatcccccgttgcgtctgagatcaatgtacggagctcataagtaccaggctgaattccccatgagtcctgtgacctcagcccacgcggggacctacaggtgctacggcacacgcagctccaacccctacctgctgtctcaccccagtgagcccctggagctcgtggtctcaggagcaactgagaccctcaatccagcacaaaagaagtcagattccaagactgccccacacctccaggattacacagtggagaatctcatccgcatgggtgtggctggcttggtcctgctgttcctcgggattctgttatttgaggctcagcacagccagagaagccccccaaggtgcagccaggaggcaaacagcagaaaggacaatgcacccttcagagtggtggagccttgggaacagatctgatgatctgaggaggttctggaagactggggcagcagttggggaagtgtctgctgagaatatcaaggggaagaagcatgggtcaggtgcaggaagatgtctgggtgtctgtagaagatgcttcctccattaaactgtggtgctttcctcctcaaaaaaaaaaaaaaa

SEQ ID NO: 22785 - DNA, 5184 bp, Homo Sapiens
ccccgcaggggaaggcgggtcctggcggccagcgcgcggtccgcgcccaccctagccgacggggccggcagagcgcgcggcgtcggtgcccttgaccatggcggcggctgcgcttctgctggggctggcgctgctggcaccgcgggcggccggcgcgggcatgggcgcgtgctatgacggcgcagggcgcccgcagcgctgcctgccggtgttcgagaacgcggcgtttgggcggctcgcccaggcctcgcacacgtgcggcagcccgcccgaggacttctgtccccacgtgggcgccgcgggcgcgggggctcattgccagcgctgcgacgccgccgacccccagcgccaccacaacgcctcctacctcaccgacttccacagccaggacgagagcacctggtggcagagcccgtccatggccttcggcgtgcagtaccccacctcggtcaacatcaccctccgcctagggaaggcttatgagatcacgtatgtgaggctgaagttccacaccagtcgccctgagagctttgccatctacaagcgcagccgcgccgacggcccatgggagccctaccagttctacagcgcctcctgccagaagacctacggccggcccgagggccagtacctgcgccccggcgaggacgagcgcgtggccttctgcacctctgagttcagcgacatctccccgctgagtggcggcaacgtggccttctccaccctggagggccggcccagcgcctacaacttcgaggagagccctgggctgcaggagtgggtcaccagcaccgaactcctcatctctctagaccggctcaacacgtttggggacgacatcttcaaggaccccaaggtgctccagtcctactattatgccgtgtccgacttctctgtgggcggcaggtgcaagtgcaacgggcatgccagcgagtgcggccccgacgtggcaggccagttggcctgccggtgccagcacaacaccaccggcacagactgtgagcgctgcctgcccttcttccaggaccgcccgtgggcccggggcaccgccgaggctgcccacgagtgtctgccctgcaactgcagtggccgctccgaggaatgcacgtttgatcgggagctcttccgcagcacaggccacggcgggcgctgtcaccactgccgtgaccacacagctgggccacactgtgagcgctgtcaggagaatttctatcactgggacccgcggatgccatgccagccctgtgactgccagtcggcaggctccctacacctccagtgcgatgacacaggcacctgcgcctgcaagcccacagtgactggctggaagtgtgaccgctgtctgcccgggttccactcgctcagtgagggaggctgcagaccctgcacttgcaatcccgctggcagcctggacacctgtgacccccgcagtgggcgctgcccctgcaaagagaatgtggaaggcaacctatgtgacagatgtcgcccggggacctttaacctgcagccccacaatccagctggctgcagcagctgtttctgctatggccactccaaggtgtgcgcgtccactgcccagttccaggtgcatcacatcctcagcgatttccaccagggagccgaaggctggtgggccagaagtgtggggggctctgagcactccccacaatggagcccaaatggggtcctcctgagcccagaagacgaggaggagctcacagcaccagggaagttcctgggagaccagcggttcagctatgggcagcccctcatactgaccttccgggtgccccccggggactccccactccctgtacagctgaggctggaagggacaggcttggccctgtccctgaggcactctagcctgtctggcccccaggatgccagggcatcccagggaggtagagctcaggttccactgcaggagacctccgaggacgtggcccctccactgccccccttccacttccagcggctcctcgccaacctgaccagcctccgcctccgcgtcagtcccggccccagccctgccggtccagtgttcctgactgaggtccggctcacatccgcccggccagggctttccccgccagcctcctgggtggagatttgttcatgtcccactggctacacgggccagttctgtgaatcctgtgctccgggatacaagagggagatgccacaggggggtccctatgccagctgtgtcccctgcacctgtaaccagcatggcacctgtgaccccaacacagggatctgtgtctgcagccaccataccgagggcccatcctgtgaacgctgtttgccaggtttctatggcaaccctttcgcgggccaagccgacgactgccagccctgtccctgccctggccagtcggcctgtacgaccatcccagagagcggggaggtggtgtgtacccactgccccccgggccagagagggcggcgctgtgaggtctgtgatgatggcttttttggggacccgctggggctctttgggcacccccagccctgccaccagtgccagtgtagcgggaacgtggaccccaatgccgtgggcaactgtgaccccctgtctggccactgcctgcgctgcctgcacaacaccacgggtgaccactgtgagcactgtcaggaaggcttctacgggagcgccctggcccctcgacccgcagacaaatgcatgccttgcagctgtcacccacagggctcggtcagtgagcagatgccctgcgacccagtgacaggccaatgctcctgcctgcctcatgtgactgcacgggactgcagccgctgctaccctggcttcttcgacctccagcctgggaggggctgccggagctgcaagtgtcacccactgggctcccaggaggaccagtgccatcccaagactggacagtgcacctgccgcccaggtgtcacaggccaggcctgtgacaggtgccagctgggtttcttcggctcctcaatcaagggctgccgggcctgcaggtgctccccactgggcgctgcctcggcccagtgccactataacggcacatgcgtgtgcaggcctggcttcgagggctacaaatgtgaccgctgccactacaacttcttcctcacggcagacggcacacactgccagcaatgtccgtcctgctacgccctggtgaaggaggagacagccaagctgaaggccagactgactttgacggaggggtggctccaagggtccgactgtggcagtccctggggaccactagacattctgctgggagaggccccaaggggggacgtctaccagggccatcacctgcttccaggggctcgggaagccttcctggagcagatgatgggcctcgagggtgctgtcaaggccgcccgggagcagctgcagaggctgaacaagggtgcccgctgtgcccaggccggatcccagaagacctgcacccagctggcagacctggaggcagtgctggagtcctcggaagaggagattctgcatgcagctgccattctcgcgtctctggagattcctcaggaaggtcccagtcagccgaccaaatggagccacctggccatagaggcccgtgccctcgccaggagccacagagacaccgccaccaagatcgcagccactgcttggagggccctgctcgcctccaacaccagctacgcgcttctctggaatctgctggagggaagggtggccctagagacccagcgggacctggaggacaggtaccaggaggtccaggcggcccagaaagcactgaggacggctgtggcagaggtgctgcctgaagcggaaagcgtgttggccaccgtgcagcaagttggcgcagatacagccccgtacctggccttgctggcttccccgggagctctgcctcagaagtcccgggctgaagacctgggcctgaaggcgaaggccctggagaagacagttgcatcatggcagcacatggccactgaggctgcccgaaccctccagactgctgcccaggcgacgctacggcaaacagaacccctcacaatggcgcgatctcggctcactgcaacctttgcctcccagctgcaccagggggccagagccgccctgacccaggcttcctcatctgtccaggctgcgacagtgactgtcatgggagccaggactctgctggctgatctggaaggaatgaagctgcagtttccccggcccaaggaccaggcggcattgcagaggaaggcagactccgtcagtgacagactccttgcagacacgagaaagaagaccaagcaggcggagaggatgctgggaaacgcggcccctctttcctccagtgccaagaagaagggcagagaagcagaggtgttggccaaggacagtgccaagcttgccaaggccttgctgagggagcggaaacaggcgcaccgccgtgccagcaggctcaccagccagacgcaagccacgctccaacaggcgtcccagcaggtgctggcgtctgaagcacgcagacaggagctggaggaagctgagcgggtgggtgctgggctgagcgagatggagcagcagatccgggaatcgcgtatctcactggagaaggacatcgagaccttgtcagagctgcttgccaggctggggtcgctggacacccatcaagccccagcccaggccctgaacgagactcagtgggcactagaacgcctgaggctgcagctgggctccccggggtccttgcagaggaaactcagtctgctggagcaggaatcccagcagcaggagctgcagatccagggcttcgagagtgacctcgccgagatccgcgccgacaaacagaacctggaggccattctgcacagcctgcccgagaactgtgccagctggcagtgagggctgcccagatccccggcacacactcccccacctgctgtttacatgacccagggggtgcacactaccccacaggtgtgcccatacagacattccccggagccggctgctgtgaactcgaccccgtgtggatagtcacactccctgccgattctgtctgtggcttcttccctgccagcaggactgagtgtgcgtacccagttcacctggacatgagtgcacactctcacccctgcacatgcataaacgggcacaccccagtgtcaataacatacacacgtgagggtgcatgtctgtgtgtatgacccaaataaaaaaaaaaa

SEQ ID NO: 22786 - DNA, 3795 bp, Homo Sapiens
caggaagggcgcgggccgcggtccctgcgcgtgcggcggcagtggcggctctgcccggaccaccgtgcacggctccgggcgaggatggcgaccccggaccagaagtcgccgaacgttctgctgcagaacctgtgctgcaggatcctgggcaggagcgaagctgatgtagcccagcagttccagtatgctgtgcgggtgattggcagcaacttcgccccaactgttgaaagagatgaatttttagtagctgaaaaaatcaagaaagagcttattcgacaacgaagagaagcagatgctgcattattttcagaactccacagaaaacttcattcacagggagttttgaaaaataaatggtcaatactctacctcttgctgagcctcagtgaggacccacgcaggcagccaagcaaggtttctagctatgctacgttatttgctcaggccttaccaagagatgcccactcaaccccttactactatgccaggcctcagacccttcccctgagctaccaagatcggagtgcccagtcagcccagagctccggcagcgtgggcagcagtggcatcagcagcattggcctgtgtgccctcagtggccccgcgcctgcgccacaatctctcctcccaggacagtctaatcaagctccaggagtaggagattgccttcgacagcagttggggtcacgactcgcatggactttaactgcaaatcagccttcttcacaagccactacctcaaaaggtgtccccagtgctgtgtctcgcaacatgacaaggtccaggagagaaggggatacgggtggtactatggaaattacagaagcagctctggtaagggacattttgtacgtctttcagggcatagatggcaaaaacatcaaaatgaacaacactgaaaattgttacaaagtagaaggaaaggcaaatctaagtaggtctttgagagacacagcagtcaggctttctgagttgggatggttgcataataaaatcagaagatacacggaccagaggagcctggaccgctcattcggactcgtcgggcagagcttttgtgctgccttgcaccaggaactcagagaatactatcgattgctctctgttttacattctcagctacaactagaggatgaccagggtgtgaatttgggacttgagagtagtttaacacttcggcgcctcctggtttggacctatgatcccaaaatacgactgaagacccttgcggccctagtggaccactgccaaggaaggaaaggaggtgagctggcctcagctgtccacgcctacacaaaaacaggagacccgtacatgcggtctctggtgcagcacatcctcagcctcgtgtctcatcctgttttgagcttcctgtaccgctggatatatgatggggagcttgaggacacttaccacgaattttttgtagcatcagatccaacagttaaaacagatcgactgtggcacgacaagtatactttgaggaaatcgatgattccttcgtttatgacgatggatcagtctaggaaggtccttttgataggaaaatcaataaatttcttgcaccaagtttgtcatgatcagactcccactacaaagatgatagctgtgaccaagtctgcagagtcaccccaggacgctgcagacctattcacagacttggaaaatgcatttcaggggaagattgatgctgcttattttgagaccagcaaatacctgttggatgttctcaataaaaagtacagcttgctggaccacatgcaggcaatgaggcggtacctgcttcttggtcaaggagactttataaggcacttaatggacttgctaaaaccagaacttgtccgtccagctacgactttgtatcagcataacttgactggaattctagaaaccgctgtcagagccaccaacgcacagtttgacagtcctgagatcctgcgaaggctggacgtgcggctgctggaggtctctccaggtgacactggatgggatgtcttcagcctcgattatcatgttgacggaccaattgcaactgtgtttactcgagaatgtatgagccactacctaagagtatttaacttcctctggagggcgaagcggatggaatacatcctcactgacatacggaagggacacatgtgcaatgcaaagctcctgagaaacatgccagagttctccggggtgctgcaccagtgtcacattttggcctctgagatggtccatttcattcatcagatgcagtattacatcacatttgaggtgcttgaatgttcttgggatgagctttggaacaaagtccagcaggcccaggatttggatcacatcattgctgcacacgaggtgttcttagacaccatcatctcccgctgcctgctggacagtgactccagggcacttttaaatcaacttagagctgtgtttgatcaaattattgaacttcagaatgctcaagatgcaatatacagagctgctctggaagaattgcagagacgattacagtttgaagagaaaaagaaacagcgtgaaattgagggccagtggggagtgacggcagcagaggaagaggaggaaaataagaggattggagaatttaaagaatctataccaaaaatgtgctcacagttgcgaatattgacccatttctaccagggtatcgtgcagcagtttttggtgttactgacgaccagctctgacgagagtcttcggtttcttagcttcaggctggacttcaacgagcattacaaagccagggagcccaggctccgtgtgtctctgggtaccagggggcggcgcagctcccacacgtgaagctcgcggtcctcccagggagctgcgggtgatgttcgttgcactgctagacacgaaattcccattgacgtcctgcaggaactgcatgctgcaggtgtcctgcccttccgcccacgagtgcgccatgtttcagcggagcggcgtgtgggagaagccacgtcgtgtttcacatgtcggagtcgaatgcatttgtaaatccctaagtcaagtaggctggctgcactgttcacatttgtctctaaaagtcttcatcgctaaaagataccataatttgctgaggcttcttaagctttctatgttataatttatatttgtcactttaaaaaatccatttcttttagaaaaaattagggtgataggatattcattagttaagatggtaacgtcattgctatttttttaacatcctctttagaggtaatttttgttaacataaccaaaaattaaattgaaacaaaatgtcccaactaagaaaatatatagagcattttatttttttttagtgttgtaaaatattaacctctgtgagatcctttgtatcttaatgcattacctttacacatatttattcttattttctctcctttcagagtttacatttttatatttaatttactatttcagatttttaaaatagtatagaaaaaagtaggagtgatagagaacaaaaatactcttatacagtgcaacccaaataccgcgaatgcatcagctaaagcagcgtgtaaataggagtgatgagaaagttaatggagtattttattttcaaagttcctgataagcattggaaagaaatcgacatggataatgaagatttcctttttccttgcctattttttcattgtaaatatttatatactactgaccaagatgttggggtgggggggattgttttttgtaaaaatgtcattatcaggtcacataaatctgcctttatgttgcataagtgaaaatttagaaaattaaaagcaattatctttcaaaaaa

SEQ ID NO: 22787 - DNA, 2250 bp, Homo Sapiens
gcggcctttcatttccgcttccggtgcgggccgcgcgcgagcgcagcggtgggaggcggcgaccagccggttgaggccccaggcttggcctcaccacaatgtggcacgaggctcggaagcatgagcggaagcttcgaggcatgatggtcgactacaagaagagggcggagcggagacgggagtattatgaaaagatcaagaaggacccagcccagttcctgcaggtacatggccgagcttgcaaggtgcacctggattctgcagtcgccctggccgctgagagccctgttaatatgatgccctggcagggggacaccaacaacatgattgaccgattcgatgtccgtgcccacctggaccacatccccgactacaccccccctctgctcaccaccatctccccagaacaggagtcggacgaacggaagtgtaactacgagcgctacagaggcctggtgcagaacgactttgccggcatctcagaggagcagtgcctgtaccagatctacattgatgagttgtacggaggcctccagagacccagcgaagatgagaagaagaagctggcagagaagaaggcttccatcggttatacctacgaggacagcacggtggccgaggtagagaaggcggcagaaaagccagaggaggaggagtcagcggccgaggaggagagcaactcggacgaagatgaggtcatccccgacatcgacgtggaggtggacgtggatgaattgaaccaggagcaggtggcagatctcaacaaacaggccacgacttatggcatggccgacggtgacttcgtcaggatgctccggaaagacaaggaggaggcagaggccatcaagcatgccaaggctcttgaggaggagaaggccatgtactcgggacgccgctctcgacgccagcggagagagtttcgggagaagcggctgaggggtcgcaagatcagcccacccagctatgcccgccgagacagccccacctatgacccctataagcggtcaccctcggagtccagctcagagtcccgctcccgctcccgctccccgaccccgggccgcgaggagaagatcacgttcatcaccagttttgggggcagcgatgaggaggcagccgcagccgctgctgccgcagcagcatcaggagtcaccacagggaagccccccgcacctccccagcctggcggccccgccccgggacgtaatgccagcgcccgccgccgctcctcctcctcctcctcctcctcttctgcctcgaggacctccagctcccgctccagctctcgctccagctcccgctctcgccgtggtgggggctactaccgttccggccgccacgcccgctcccggtcccgctcctggtcccgctcccgctcccgctcccggcgctattcccggtcccgtagccgtggccggcggcactcaggtgggggctcccgagacggacaccggtactcccgctcgcccgcccggcgtggtggttacgggccccggcgcagaagcaggagccgctcccactcaggggaccgctacaggcggggcggccggggcctcaggcaccacagcagtagccgcagccgcagcagctggtccctcagcccgtcccgcagtcgcagcctgactcgcagccgcagccatagccccagccccagccagagccgcagccgcagccgcagccgcagccagagcccctcgccatcacccgcaagagagaagctgaccaggccggccgcgtcccctgctgtgggcgagaagctgaaaaagaccgaacctgccgctggtaaagagacaggagctgccaaacccaagctgacgcctcaggagaagctgaaactgaggatgcagaaggcgctgaacaggcagttcaaggcggataagaaggcggcacaagaaaagatgatccagcaggagcatgagcggcaggagcgggaagacgagcttcgagccatggcccgcaagatccgcatgaaggagcgggaacgccgagagaaggagagagaagagtgggaacgccagtacagccggcagagccgctcaccctccccccgatacagtcgagaatacagctcttctcgaaggcgctcaaggtcccgatcccgaagcccccattaccgacattaggcagaagagtggggggtggggaggacaagggggtgggtaaggggctcaagctgtgatgctgctggttttatctctagtgaaataaagtcaaaagttatttaattcccgtcaaaaaaaaaaaaaaaaa

SEQ ID NO: 22788 - DNA, 933 bp, Homo Sapiens
atggactcctggaccttctgctgtgtgtccctttgcatcctggtagcgaagcatacagatgctggagttatccagtcaccccgccatgaggtgacagagatgggacaagaagtgactctgagatgtaaaccaatttcaggccacaactcccttttctggtacagacagaccatgatgcggggactggagttgctcatttactttaacaacaacgttccgatagatgattcagggatgcccgaggatcgattctcagctaagatgcctaatgcatcattctccactctgaagatccagccctcagaacccagggactcagctgtgtacttctgtgccagcaccccgaactatagcaatcagccccagcattttggtgatgggactcgactctccatcctagaggacctgaacaaggtgttcccacccgaggtcgctgtgtttgagccatcagaagcagagatctcccacacccaaaaggccacactggtgtgcctggccacaggtatcttccctgaccacgtggagctgagctggtgggtgaatgggaaggaggtgcacagtggggtcagcacggacccgcagcccctcaaggagcagcccgccctcaatgactccagatactgcctgagcagccgcctgagggtctcggccaccttctggcagaacccccgcaaccacttccgctgtcaagtccagttctacgggctctcggagaatgacgagtggacccaggatagggccaaacccgtcacccagatcgtcagcgccgaggcctggggtagagcagactgtggctttacctcggtgtcctaccagcaaggggtcctgtctgccaccatcctctatgagatcctgctagggaaggccaccatgtatgctgtgctggtcagcgcccttgtgttgatggccatggtcaagagaaaggatttctga

SEQ ID NO: 22789 - DNA, 2310 bp, Homo Sapiens
cgatttcattcctcgctccccacaggtccctctccccaaaatattcccatcttgtcctagcccatcccccagactatctcaaggaccagctgtccccacgcccccgacctccactaggcctgtgccacccgctgcctgcaggaagacgcccggtcccgggccgggttagccccatgggaacggggttcggtccgagcccggtgggaggctcccggagcgcagcctgggcccagcccaccccgcgccggcggccatggcaggcaccctggacctggacaagggctgcacggtggaggagctgctccgcgggtgcatcgaagccttcgatgactccgggaaggtgcgggacccgcagctggtgcgcatgttcctcatgatgcacccctggtacatcccctcctctcagctggcggccaagctgctccacatctaccaacaatcccggaaggacaactccaattccctgcaggtgaaaacgtgccacctggtcaggtactggatctccgccttcccagcggagtttgacttgaacccggagttggctgagcagatcaaggagctgaaggctctgctagaccaagaagggaaccgacggcacagcagcctaatcgacatagacagcgtccctacctacaagtggaagcggcaggtgactcagcggaaccctgtgggacagaaaaagcgcaagatgtccctgttgtttgaccacctggagcccatggagctggcggagcatctcacctacttggagtatcgctccttctgcaagatcctgtttcaggactatcacagtttcgtgactcatggctgcactgtggacaaccccgtcctggagcggttcatctccctcttcaacagcgtctcacagtgggtgcagctcatgatcctcagcaaacccacagccccgcagcgggccctggtcatcacacactttgtccacgtggcggagaagctgctacagctgcagaacttcaacacgctgatggcagtggtcgggggcctgagccacagctccatctcccgcctcaaggagacccacagccacgttagccctgagaccatcaagctctgggagggtctcacggaactagtgacggcgacaggcaactatggcaactaccggcgtcggctggcagcctgtgtgggcttccgcttcccgatcctgggtgtgcacctcaaggacctggtggccctgcagctggcactgcctgactggctggacccagcccggacccggctcaacggggccaagatgaagcagctctttagcatcctggaggagctggccatggtgaccagcctgcggccaccagtacaggccaaccccgacctgctgagcctgctcacggtgtctctggatcagtatcagacggaggatgagctgtaccagctgtccctgcagcgggagccgcgctccaagtcctcgccaaccagccccacgagttgcaccccaccaccccggcccccggtactggaggagtggacctcggctgccaaacccaagctggatcaggccctcgtggtggagcacatcgagaagatggtggagtctgtgttccggaactttgacgtcgatggggatggccacatctcacaggaagaattccagatcatccgtgggaacttcccttacctcagcgcctttggggacctcgaccagaaccaggatggctgcatcagcagggaggagatggtttcctatttcctgcgctccagctctgtgttgggggggcgcatgggcttcgtacacaacttccaggagagcaactccttgcgccccgtcgcctgccgccactgcaaagccctgatcctgggcatctacaagcagggcctcaaatgccgagcctgtggagtgaactgccacaagcagtgcaaggatcgcctgtcagttgagtgtcggcgcagggcccagagtgtgagcctggaggggtctgcaccctcaccctcacccatgcacagccaccatcaccgcgccttcagcttctctctgccccgccctggcaggcgaggctccaggcctccagagatccgtgaggaggaggtacagacggtggaggatggggtgtttgacatccacttgtaatagatgctgtggttggatcaaggactcattcctgccttggagaaaatacttcaaccagagcagggagcctgggggtgtcggggcaggaggctggggatgggggtgggatatgagggtggcatgcagctgagggcagggccagggctggtgtccctaaggttgtacagactcttgtgaatatttgtattttccagatggaataaaaaggcccgtgtaattaaccttca

SEQ ID NO: 22790 - DNA, 2807 bp, Homo Sapiens
acgtcgccatcttgggtccgcgggacaagaaaattcatgcgagggagacgtggtgggcggtccttcctgtgacacgacccttgagtgacagttctatttgattgcctccggtactgtgaggaaaggacacgactctatggtgaggactgatggacatacattatctgagaaaagaaactaccaggtgacaaacagcatgtttggtgcttcaagaaagaagtttgtagagggggtcgacagtgactaccatgacgaaaacatgtactacagccagtcttctatgtttccacatcggtcagaaaaagatatgctggcatcaccatctacatcaggtcagttgtctcagttttggggcaagtttttcgggcaacaaagtgcactaggcctttccaatgagggggatgagcaacaatacccctcagttaaatctgcagcttatcacaaggcactcagttaccgagccacgtcacgccaacaacaggggtaccaacaatgtcacttcacaccgcctccatctccaagcaggggtattttgcctatgaatcctaggaatatgatgaaccactcccaggttggtcagggcattggaattcctagcaggacaaatagcatgagcagttcagggttaggtagccccaacagaagctcgccaagcataatatgtatgccaaagcagcagccttctcgacagccttttactgtgaacagtatgtctggatttggaatgaacaggaatcaggcatttggaatgaataactccttatcaagtaacatttttaatggaacagacggaagtgaaaatgtgacaggattggacctttcagatttcccagcattagcagaccgaaacaggagggaaggaagtggtaacccaactccattaataaaccccttggctggaagagctccttatgttggaatggtaacaaaaccagcaaatgaacaatcccaggacttctcaatacacaatgaagattttccagcattaccaggctccagctataaagatccaacatcaagtaatgatgacagtaaatctaatttgaatacatctggcaagacaacttcaagtacagatggacccaaattccctggagataaaagttcaacaacacaaaataataaccagcagaaaaaagggatccaggtgttacctgatggtcgggttactaacattcctcaagggatggtgacggaccaatttggaatgattggcctgttaacatttatcagggcagcagagacagcccaggaatggtacatcttgcattaggaagtgacttaacaaccattaggcctcaatctgaactctcctgaaatctctaccccaaatttgcgtcaccctgggcatcttcaccttgtcgacctcaagacatagacttccatgttccatctgagtacttaacggaacatcacattagggataagctggctgcaataaaacttggccgatatggtgaagaccttctcttctatctctattacatgaatggaggagacgtattacaacttttagctgcagtggagctttttaaccgtgattggagataccacaaagaagaacgagtatggattaccagggcaccaggcatggagccaacaatgaaaaccaatacctatgagaggggaacatattacttctttgactgtcttaactggaggaaagtagctaaggagttccatctggaatatgacaaattagaagaacggcctcacctgccatccaccttcaactacaaccctgctcagcaagccttctaaaaagacttcccttttcttggggtatggctgtctcagcacaatactcaacataactgcagaactgatgtggctcaggcaccctggttttaattccttgaggatctggcaattggcttacgcaaaaggtcaccatttgaggtcctgccttactaattatgtgctgcccaacaactaaatttgtaatttgtttttctctagtttgagcagggtctgaattttttcatttatttccttttttgccagcagacagacttgagtctgtaaagacaagcaaatacactgacagaagttaccatttagtttcttaaatgtaaaaaaagaaaacccacaaaagactcaacaaaattagaccacaaaatttgcattgttcattgtagcactattggtaataaaagaacagatgtttgtgcatttttatgtgaagatccttctcgtatttcatttggaaggatgagcgaggtctgcttctttctttttacttcccctgtgtttctgaaaggcggtttggccaggcttactgcaggcatccgactgtagagatcgccacagtctctggggctccagggttgtgttattactgagcttcatctttccagaatgagcaaaacactgtccagtctttgttacgattttgtaataaatgtgtacattttttttaaatttttggacatcacatgaataaaggtatgtatgtacgaatgtgtatatattatatatatgacatctattttggaaaatgtttgccctgctgtacctcatttttaggaggtgtgcatggatgcaatatatgaaaatgggacattctggaactgctggtcaggggactttgtcgccctgtgcactaaaagggccagattttcagcagccaaggacatccatacccaagtgaatgtgatgggacttaaaagaagtgaactgagacaattcactctggctgtttgaacagcagcgtttcataggaagagaaaaaaagatcaatcttgtattttctgaccacataaaggcttcttctctttgtaataaagtagaaaagctctaaaaaaaaa

SEQ ID NO: 22791 - DNA, 3300 bp, Homo Sapiens
ggtatcatactccagcaagcgcacatcatcagtgacgtcgatcacgatgcatcgtcatggcggcagcgccgttcttgaagcactggcgcaccacttttgagcgggtggagaagttcgtgtccccgatctacttcaccgactgtaacctccgcggcaggctttttggggccagctgccctgtggctgtgctctccagcttcctgacgccggagagacttccctaccaggaggcagtccagcgggacttccgccccgcgcaggtcggcgacagcttcggacccacatggtggacctgctggttccgggtggagctgaccatcccagaggcatgggtgggccaggaagttcacctttgctgggaaagtgatggagaaggtctggtgtggcgtgatggagaacctgtccagggtttaaccaaagagggtgagaagaccagctatgtcctgactgacaggctgggggaaagagacccccgaagcctcactctctatgtggaagtagcctgcaatgggctcctgggggccgggaagggaagcatgattgcagcccctgaccctgagaagatattccagctgagccgggctgagctagctgtgttccaccgggatgtccacatgctcctggtggatctggagctgctgctgggcatagccaagggcctcgggaaggacaaccagcgcagcttccaggccctgtacacagccaatcagatggtgaacgtgtgtgaccctgcccagcccgagaccttcccagtggcccaggccctggcctccaggttctttggccaacatgggggtgaaagccaacacaccattcatgccacagggcactgccacattgatacagcctggctttggcccttcaaagagactgtgaggaaatgtgcccggagctgggtgaccgccctgcagctcatggagcggaaccctgagttcatctttgcctgctcccaggcgcagcagctggaatgggtgaagagccgctaccctggcctgtactcccgcatccaggagtttgcgtgccgtgggcagtttgtgcctgtggggggcacctgggtggaaatggatgggaacctgcccagtggagaggccatggtgaggcagtttttgcagggccagaacttctttctgcaggagtttgggaagatgtgctctgagttctggctgccggacacctttggctactcagcacagctcccccagatcatgcacggctgtggcatcaggcgctttctcacccagaaattgagctggaatttggtgaactccttcccacaccatacatttttctgggagggcctggatggctcccgtgtactggtccacttcccacctggcgactcctatgggatgcagggcagcgtggaggaggtgctgaagaccgtggccaacaaccgggacaaggggcgggccaaccacagtgccttcctctttggctttggggatgggggtggtggccccacccagaccatgctggaccgcctgaagcgcctgagcaatacggatgggctgcccagggtgcagctatcttctccaagacagctcttctcagcactggagagtgactcagagcagctgtgcacgtgggttggggagctcttcttggagctgcacaatggcacatacaccacccatgcccagatcaagaaggggaaccgggaatgtgagcggatcctgcacgacgtggagctgctcagtagcctggccctggcccgcagtgcccagttcctatacccagcagcccagctgcagcacctctggaggctccttcttctgaaccagttccatgatgtggtgactggaagctgcatccagatggtggcagaggaagccatgtgccattatgaagacatccgttcccatggcaatacactgctcagcgctgcagccgcagccctgtgtgctggggagccaggtcctgagggcctcctcatcgtcaacacactgccctggaagcggatcgaagtgatggccctgcccaaaccgggcggggcccacagcctagccctggtgacagtgcccagcatgggctatgctcctgttcctccccccacctcactgcagcccctgctgccccagcagcctgtgttcgtagtgcaagagactgatggctccgtgactctggacaatggcatcatccgagtgaagctggacccaactggtcgcctgacgtccttggtcctggtggcctctggcagggaggccattgctgagggcgccgtggggaaccagtttgtgctatttgatgatgtccccttgtactgggatgcatgggacgtcatggactaccacctggagacacggaagcctgtgctgggccaggcagggaccctggcagtgggcaccgagggcggcctgcggggcagcgcctggttcttgctacagatcagccccaacagtcggcttagccaggaggttgtgctggacgttggctgcccctatgtccgcttccacaccgaggtacactggcatgaggcccacaagttcctgaaggtggagttccctgctcgcgtgcggagttcccaggccacctatgagatccagtttgggcacctgcagcgacctacccactacaatacctcttgggactgggctcgatttgaggtgtgggcccatcgctggatggatctgtcagaacacggctttgggctggccctgctcaacgactgcaagtatggcgcgtcagtgcgaggcagcatcctcagcctctcgctcttgcgggcgcctaaagccccggacgctactgctgacacggggcgccacgagttcacctatgcactgatgccgcacaagggctctttccaggatgctggcgttatccaagctgcctacagcctaaacttccccctgttggctctgccagcccccagcccagcgcccgccacctcctggagtgcgttttccgtgtcttcacccgcggtcgtattggagaccgtcaagcaggcggagagcagcccccagcgccgctcgctggtcctgaggctgtatgaggcccacggcagccacgtggactgctggctgcacttgtcgctgccggttcaggaggccatcctctgcgatctcttggagcgaccagaccctgctggccacttgacttcgggacaaccgcctgaagctcaccttttctcccttccaagtgctgtccctgttgctcgtgcttcagcctccgccacactgagtccctggggctggggttttgtttgtagaaggctctggggactcctaatttctgcttccccagcctaaagcagggatcagtcttttcttgtggaataaatccttggatcgggaaaaaaaaaaa

SEQ ID NO: 22792 - DNA, 2078 bp, Homo Sapiens
atccattcccgcctgcctgtgtttcagtttgacaatcagggttacttcaactcatgcaccatgaaaagctgctgttttgcaggagatcgtgaccagtatatcctttcgggctctgatgacttcaacctgtacatgtggagaattcctgcagatccagaagcaggtggcattggtagggtggtcaacggagccttcatggtgctgaaagggcatcgatctattgttaaccaagtccgatttaatccccacacctacatgatctgctcttctggtgtagaaaagattatcaagatctggagcccatacaagcagccaggatgtactggagacctcgacggtcggattgaggacgattcccgctgcctctatacccatgaagagtacatcagccttgtgctgaacagtgggagtggcctgtcgcatgaccacgccaaccagtcggtccaggaagacccccggatgatggccttctttgactcactggtacgccgagagatcgaaggctggagctctgactcagacagtgacctcagtgagagtactatcctccaactgcacgctggggtcagcgagcgctcaggctacactgactcagagtcttcggcctcattgcctcgctccccgcctcccacagtagatgagtctgccgacaacgccttccacctggggcccctgcgggtcaccaccacaaacacagtagcctcaactccaccaacacccacgtgtgaggatgcagcctctcgccagcagcgtctgtctgctctgcggcgctaccaagacaaacgcctcctggccctttccaatgagtccgattctgaggagaatgtctgtgaggtggaactagacacagatctctttccccggccacggtcacccagccccgaagatgaatccagcagttccagcagctctagcagctctgaggatgaggaggagctgaatgaacgccgagcctctacctggcagcggaatgccatgcggcgccgacagaagacaacccgagaagacaagcccagtgccccaatcaagcccaccgacacttacattggagaagacaactatgattacccccagatcaaagtggatgacctctcctcctccccaacctcgtcccctgagcggagcacttccacgctagagattcaaccaagccgggcatcaccaacttctgacatagaatcagttgagcgaaaaatttataaagcttacaagtggctccgctactcttatatctcctactcaaataacaaagatggagagacctccttggtgactggggaggcagatgaagggagagcaggaaccagccacaaagacaacccagccccttcttccagtaaggaagcctgtctaaacatagcaatggcccagaggaaccaggacctgccacctgaaggctgcagcaaggacacttttaaagaagagactcctagaactcccagcaatggcccaggccatgagcacagcagccatgcttgggcagaggtgccagagggtacctctcaggacactggcaatagcggctctgtatgagcacccttttgaaaccaagaagctcaatggaaaggccctgagcagtcgggctgaggagccgccttctcctcctgtccccaaggcatctggctccactctcaacagcggttggcaatgtcccaggacccagttgatgacagtgaggagaggagcctcgaaaccatctgtgccaaccacaacaatggacgttacacctgtcccctcacctcacaataacgggcagaacttgggggagctggaggtggtggctactcttccccaggacactcagacactgaccgtgataattcgtccctgacagggacactcctacacaaagattgttgcgggtctgaaatggcctgtgagacccccaatgctggaacaagagaggaccccactgacaccccagccacagatagtagcagggctgttcatggccacagtggcctcaaaaggcaacgaattgaattggaagatacagattcagagaattcctcctcagagaagaaattaaaaacatgataaatacaaagggaaaacaaaaagctacaaaagtagcctta

SEQ ID NO: 22793 - DNA, 464 bp, Homo Sapiens
ctcccaagatgtcgttcccaaagtataagccgtcgagcctgcgcactctgcctgagaccctcgacccagccgaatacaacatatctccggaaacccggcgggcgcaagccgagcggttggccataagagcccagctgaaacgagagtacctgcttcagtacaacgatcccaaccgccgagggctcatcgaaaatcctgccttgcttcgttgggcctatgcaagaacaataaatgtctatcctaatttcagacccactcctaaaaactcactcatgggagctctgtgtggatttgggcccctcatcttcatttattatattatcaaaactgagagggataggaaagaaaaacttatccaggaaggaaaattggatcgaacatttcacctctcatattaagtctggcaatgatgactatatgtattcctgcctaaataaatcatctattaatcattaaaaaaaaaa

SEQ ID NO: 22794 - DNA, 1476 bp, Homo Sapiens
gttaaacccatccagagtaatggctgcggccttacccaggaccctgggggagttgcagctgtatagaatattacaaaaagccaatctactttcttattttgatgcctttatccaacaaggtggtgatgatgtccagcaactctgtgaagcaggagaagaggagtttttggaaatcatggcactcgtgggcatggctagcaagccccttcatgttagaaggctgcagaaggctttgagagactgggtcacaaaccctgggcttttcaatcagccactgacttcccttcctgtcagtagcatacccatctataaattaccagagggatcaccaacatggctgggaatatcctgcagtagttatgaaaggagtagcaatgcccgggaacctcatttaaaaatccccaaatgtgctgccaccacctgtgtgcagagcttgggacaggggaagtcagatgtggttgggagcctagcactgcagagtgttggtgagtccagactctggcaaggccaccatgccactgagagcgagcacagcctctccccagcagacctgggctcccccgcgtccccaaaggagagcagtgaggcgctggatgctgctgctgcgctctctgtggctgagtgtgtggagcggatggcccccacactgccaaaaagtgacttgaatgaagtgaaagagctgctaaaaaccaacaagaagttggccaaaatgattggtcacatctttgagatgaacgatgatgatccacacaaagaggaggaaattcggaaatacagtgcaatatatggcagatttgactcaaagaggaaggatgggaaacatctcacacttcatgagctcactgttaatgaagcggctgctcaactctgtgtgaaggataatgccctgctgacaagaagagatgagctttttgccttggctcgacagatttctcgagaagtcacctataaatatacttacagaaccaccaagtcaaaatgtggagaaagagatgaattatccccaaagagaattaaagtggagcagcagcctgaaaaggtgatggcaaagcagatggagttcctttgcaaccaagctggctatgagagactgcagcatgccgagaggaggttgtctgcagggctttacaggcagagctcagaagagcacagtcctaacggcttgacttccgataactcagatggacaaggagaaagacctttgaatctccgaatgcctaatttacagaacagacaaccccatcattttgtggtggatggggagctgagcagactttaccccagtgaggcaaagtcccactcatcagagagccttgggattttaaaagactaccctcattcagcttttaccttagaaaagaaagtcatcaaaacagagcctgaagattcaagatagctgtgatttctctcaccgttctctggaaatggcatcagatttaaggataatactccatcatagaaataagccttaataac

SEQ ID NO: 22795 - DNA, 2544 bp, Homo Sapiens
atgggcgaaccgctgacagaccaggagaagcggcggcagatcagcatccgcggcatcgtgggcgtggagaacgtggcagagctgaagaagagtttcaaccggcacctgcacttcacgctggtcaaggaccgcaacgtggccaccacccgcgactactacttcgcgctggcgcacacggtgcgggaccacctggtggggcgctggatccgcacgcagcagcactactacgacaagtgccccaagagggtatattacctctctctggaattttacatgggccgaacattacagaacaccatgatcaacctcggtctgcaaaatgcctgtgatgaggccatttaccagcttggattggatatagaagagttagaagaaattgaagaagatgctggacttggcaatggtggtcttgggagacttgctgcctgcttcttggattccatggcaaccctgggacttgcagcctatggatacggcattcggtatgaatatgggattttcaatcagaagatccgagatggatggcaggtagaagaagcagatgattggctcagatatggaaacccttgggagaagtcccgcccagaattcatgctgcctgtgcacttctatggaaaagtagaacacaccaacaccgggaccaagtggattgacactcaagtgatcctggctctgccatatgacacccccgagcccggctacatgaataacactgtcaacaccatgcgcctctggtctgctcgggcaccaaatgactttaacctcagagactttaatgttggagactacattcaggctgtgctggaccgaaacctggccgagaacatctcccgggtcctctatcccaatgacaatttttttgaagggaaggagctaagattgaagcaggaatactttgtggtggctgcaaccttgcaagatatcatccgccgtttcaaagcctccaagtttggctccacccgtggtgcaggaactgtgtttgatgccttcccggatcaggtggccatccagctgaatgatactcaccctgcactcgcgatccctgagctgatgaggatttttgtggatattgaaaaactgccctggtccaaggcatgggagctcaaccagaagaccttcgcctacaccaaccacacagtgctcccggaagccctggagcgctggcccgtggacctggtggagaagctgctccctcgacatttggaaatcatttatgagataaatcagaagcatttagatagaattgtggccttgtttcctaaagatgtggaccgtctgagaaggatgtctctgatagaagaggaaggaagcaaaaggatcaacatggcccatctctgcattgtcggttcccatgctgtgaatggcgtggctaaaatccactcagacatcgtgaagactaaagtattcaaggacttcagtgagctagaacctgacaagtttcagaataaaaccaatgggatcactccaaggcgctggctcctactctgcaacccaggacttgcagagctcatagcagagaaaattggagaagactatgtgaaagacctgagccagctgacgaagctccacagcttcctgggtgatgatgtcttcctccgggaactcgccaaggtgaagcaggagaataagctgaagttttctcagttcctggagacggagtacaaagtgaagatcaacccatcctccatgtttgatgtccaggtgaagaggatacatgagtacaagcgacagctcttgaactgtctgcatgtgatcacgatgtacaaccgcattaagaaagaccctaagaagttattcgtgccaaggacagttatcattggtggtaaagctgccccaggatatcacatggccaaaatgatcataaagctgatcacttcagtggcagatgtggtgaacaatgaccctatggttggaagcaagttgaaagtcatcttcttggagaactacagagtatctcttgctgaaaaagtcattccagccacagatctgtcagagcagatttccactgcaggcaccgaagcctcggggacaggcaatatgaagttcatgctaaatggggccctaactatcgggaccatggatggggccaatgtggaaatggcagaagaagctggggaagagaacctgttcatctttggcatgagcatagatgatgtggctgctttggacaagaaagggtacgaggcaaaagaatactatgaggcacttccagagctgaagctggtcattgatcaaattgacaatggctttttttctcccaagcagcctgacctcttcaaagatatcatcaacatgctattttatcatgacaggtttaaagtctttgcagactacgaagcctatgtcaagtgtcaagataaagtgagtcagctgtacatgaatccaaaggcctggaacacaatggtactcaaaaacatagctgcctcggggaaattctccagtgaccgaacaattaaagaatatgcccaaaacatctggaacgtggaaccttcagatctaaagatttctctatccaatgaatctaacaaagtcaatggaaattga

SEQ ID NO: 22796 - DNA, 2675 bp, Homo Sapiens
ggttgggaacacagacattttcggagctggagccgccactgccgccgccattttgtgtctgtggagaaagaagcttctgtggcggctggaagtggacggagatcacccgcgagacggcggcgtttcatacccgaggttccccctgtgtcgtcccccatcccccctccgcggtcagcatgtggtgaagccggagccgcgagagagccggggagaggaagaggagtcggaagggaggcggggtatccagagcggcttcagcttcagctgcagcggacctcggaggggggccgcggcgcaatgtcagagcagacgccggccgaggccggtgctgcgggggcccgggaggacgcctgtcgggattatcagtcatcgctcgaagacctgaccttcaatagcaagccgcacatcaatatgctgaccattctagccgaggagaacctgcccttcgccaaggagatcgtctctctcatcgaggcccaaaccgccaaggctccttcctcagagaagcttcctgttatgtaccttatggattctattgtgaaaaacgttggaagagagtatctcactgcctttactaaaaatctagttgcaacatttatttgtgtgtttgaaaaggtggatgaaaatactaggaaaagtttatttaagttacgttctacatgggatgaaatattccctttgaagaaactttatgccctggatgtcagagtcaattcattagatcctgcttggcctattaaacctctaccccccaatgtgaatacgtctagcatccatgtgaatcctaaatttttaaataaatcgcccgaggagccttcaacacctggtacagtggtcagttcccctagcatctccactcctccaattgttcctgatatacaaaagaatcttacacaagaacaactaataaggcaacagttactggcaaagcaaaaacagttgttagaacttcagcagaaaaagctggagcttgagctagagcaagctaaggcacagttggcagtttctcttagtgttcagcaggaaacatccaatttaggtcctggatctgcaccatccaaattacatgtttcacagattccccctatggcagttaaagctcctcatcaggttcctgtgcaatctgagaaaagccgtccaggaccatccttacaaattcaggatttaaaaggaactaaccgggatcctcgtctgaacaggataagccaacattctcatggaaaagatcagagtcacaggaaagaatttctaatgaacacattaaaccagtctgatactaagacaagtaaaactataccctctgaaaaactaaattcatccaagcaagaaaaaagtaaatcaggtgaaaaaataaccaagaaagaacttgaccaattagattctaaatcgaaatcgaaatcgaaatcaccctcacctttgaaaaacaaattatctcacacaaaagacttgaaaaatcaagaatcggaaagtatgaggttgtctgatatgaacaagagagatccaagattaaaaaaacatcttcaggataagaccgatggcaaagatgatgatgtgaaagagaagagaaaaactgcagaaaaaaaggataaagatgagcacatgaagtcatccgaacacagactggctggaagtagaaataaaatcataaatggcattgtacaaaaacaggatacaataacagaagagtcagaaaaacaggggacaaaaccagggagatcgagtactagaaagcgatcaagatctcgatcacccaagtctaggtcaccaattatacattccccaaagagaagagataggcggtcacccaaacgaaggcaaagaagtatgtctccaacatcgacacctaaagctggaaagattcgccaatctggagctaagcagtcacatatggaagagtttacaccaccttctagggaagacagaaatgctaagagaagtactaaacaggatattcgggatccaaggcgaatgaaaaagactgaagaggagcgaccacaagaaactacaaatcagcattctacaaagtcaggcactgaaccaaaggagaatgtagaaaactggcaaagttccaagtctgccaaaagatggaaatctggttgggaagaaaataaaagcttacaacaggttgatgaacatagtaaacctcctcatctgaggcatagggagagctggtcaagcactaaaggaattttatcacctcgagccccaaagcagcaacagcatcgattaagtgtagatgccaatcttcagattcctaaagagttaactcttgcaagcaaaagagaattacttcaaaagacgagtgaacgtttagcatctggtgaaattacacaggatgacttccttgttgttgtgcatcaaattcgacagctatttcagtatcaagaaggtgtgcgagaagagcagagatctccattcaatgatcgtttccacttaagcgacctcgatatgaagattcagataaaccatttgtagatagtccagcatcaagatccgccggcctggatacaaatcagcgacttacagctttagctgaagacagaccgttatttgatggacctagtaggccatcagtagcaagagatggcccaacgaagatgatttttgaaggacccaataaattaagccctcgaattgatggactccggaaaaaaaaaaaaaaaaaaaaaaaaaaa

SEQ ID NO: 22797 - DNA, 2041 bp, Homo Sapiens
ggcgccgggattgggagggcttcttgcaggctgctgggctggggctaagggctgctcagtttccttcagcggggcactgggaagcgccatggcactgcagggcatctcggtcatggagctgtccggcctggccccgggcccgttctgtgctatggtcctggctgacttcggggcgcgtgtggtacgcgtggaccggcccggctcccgctacgacgtgagccgcttgggccggggcaagcgctcgctagtgctggacctgaagcagccgcggggagccgccgtgctgcggcgtctgtgcaagcggtcggatgtgctgctggagcccttccgccgcggtgtcatggagaaactccagctgggcccagagattctgcagcgggaaaatccaaggcttatttatgccaggctgagtggatttggccagtcaggaagcttctgccggttagctggccacgatatcaactatttggctttgtcaggtgttctctcaaaaattggcagaagtggtgagaatccgtatgccccgctgaatctcctggctgactttgctggtggtggccttatgtgtgcactgggcattataatggctctttttgaccgcacacgcactgacaagggtcaggtcattgatgcagatatggtggaaggaacagcatatttaagttcttttctgtggaaaactcagaaatcgagtctgtgggaagcacctcgaggacagaacatgttggatggtggagcacctttctatacgacttacaggacagcagatggggaattcatggctgttggagcaatagaaccccagttctacgagctgctgatcaaaggacttggactaaagtctgatgaacttccctctcagatgagcacggatgattggccagaaatgaagaagaagtttgcagatgtatttgcaaagaagacgaaggcagagtggtgtcaaatctttgacggcacagatgcctgtgtgactccggttctgacttttgaggaggttgttcatcatgatcacaacaaggaacggggctcgtttatcaccagtgaggagcaggacgtgagcccccgccctgcacctctgctgttaaacaccccagccatcccttctttcaaaagggatcctttcataggagaacacactgaggagatacttgaagaatttggattcagccgcgaagagatttatcagcttaactcagataaaatcattgaaagtaataaggtaaaagctagtctctaacttccaggcccacggctcaagtgaatttgaatactgcatttacagtgtagagtaacacataacattgtatgcatggaaacatggaggaacagtattacagtgtcctaccactctaatcaagaaaagaattacagactctgattctacagtgatgattgaattctaaaaatggttatcattagggcttttgatttataaaactttgggtacttatactaaattatggtagttattctgccttccagtttgcttgatatatttgttgatattaagattcttgacttatattttgaatgggttctagtgaaaaaggaatgatatattcttgaagacatcgatatacatttatttacactcttgattctacaatgtagaaaatgaggaaatgccacaaattgtatggtgataaaagtcacgtgaaacagagtgattggttgcatccaggccttttgtcttggtgttcatgatctccctctaagcacattccaaactttagcaacagttatcacactttgtaatttgcaaagaaaagtttcacctgtattgaatcagaatgccttcaactgaaaaaaacatatccaaaataatgaggaaatgtgttggctcactacgtagagtccagagggacagtcagttttagggttgcctgtatccagtaactcggggcctgtttccccgtgggtctctgggctgtcagctttcctttctccatgtgtttgatttctcctcaggctggtagcaagttctggatcttatacccaacacacagcaacatccagaaataaagatctcaggaccccccaa

SEQ ID NO: 22798 - DNA, 2330 bp, Homo Sapiens
gtgagcgtgtgtgcgtgcgtctactttgtactgggaagaacacagcccatgtgctctgcatggacgttactgatactctgtttagcttgattttcgaaaagcaggcaagatgtccagcacaccacatgaccccttctattcttctcctttcggcccattttataggaggcatacaccatacatggtacagccagagtaccgaatctatgagatgaacaagagactgcagtctcgcacagaggatagtgacaacctctggtgggacgcctttgccactgaattttttgaagatgacgccacattaaccctttcattttgtttggaagatggaccaaagcgatacactatcggcaggaccctcatcccccgttactttagcactgtgtttgaaggaggggtgaccgacctgtattacattctcaaacactcgaaagagtcataccacaactcatccatcacggtggactgcgaccagtgtaccatggtcacccagcacgggaagcccatgtttaccaaggtatgtacagaaggcagactgatcttggagttcacctttgatgatctcatgagaatcaaaacatggcactttaccattagacaataccgagagttagtcccgagaagcatcctagccatgcatgcacaagatcctcaggtcctggatcagctgtccaaaaacatcaccaggatggggctaacaaacttcaccctcaactacctcaggttgtgtgtaatattggagccaatgcaggaactgatgtcgagacataaaacttacaacctcagtccccgagactgcctgaagacctgcttgtttcagaagtggcagaggatggtggctccgccagcagaacccacaaggcaaccaacaaccaaacggagaaaaaggaaaaattccaccagcagcacttccaacagcagcgctgggaacaatgcaaacagcactggcagcaagaagaagaccacagctgcaaacctgagtctgtccagtcaggtacctgatgtgatggtggtaggagagccaactctgatgggaggtgagtttggggacgaggacgaaaggctaatcactagattagaaaacacgcaatatgatgcggccaacggcatggacgacgaggaggacttcaacaattcacccgcgctggggaacaacagcccgtggaacagtaaacctcccgccactcaagagaccaaatcagaaaaccccccaccccaggcttcccaataagatgatcggcaccagaatccactgtcaataggcccgtgggtgatcattacaattgcaaatctttacttacaggagaggaaacagaagagataaaaacttttccatgcaaatatctatttctaaaccacaatgatctgattttctttcttctttctttttttctaattgagaggattattcccagtaagcttccatgaccctttcttggaggccttcacaggtaatacagatactggcactgattgtaattaaaatgagagaaaactctagcgcatcttctggcacggttttaacaacgtgtttgtgttgaatttcctttttatgcatcaaacgaaggccatattgtccataaatgctcagtgctcaggatctcattaatatgccgaacctaactacagatgactttttaatattgtaaaatattttctgctttttgacttgcatctgagagtttcttgtttcagtaaaaaaagaaaagacaaaaaaatcagctttggaaagtaatttaaatgtaccttattttttttttctttatgttttctttcattgggcaacagctaagagggcccagcaaggtaatttatggttgagctgatgtcaattggttcttgtcttgagtcgactcaatttagcccaagtgctgaaacaagaaatgtcatttttttcatcaaagacaccagggcagatttttaagtaaagaaagacaattggacccttaagaatttatgcatttgtaaagttgctgttgatccaaatattttcaagccatgtaatccattggttttgtgggcagtttaataaacctgaacctttgtgtgttttctaattgtacctgagttgaccatcctttctttttatagtatatttcttgtatgatattttgtaaagctctcacctggttcttttatggggacttttcgtttttgggcaactccagtgtatttatgtgaaactttataagagaattaatttttccatttgcatattaatatgttcctccacacatgtaaaggcacagtggctccgtgtgttaaaaaacagctgtattttatgtatgctttactgataagtgtgccaataataaactgtgttaatgacc

SEQ ID NO: 22799 - DNA, 3751 bp, Homo Sapiens
gcctgatggaaacaagggtgaacctggtgtggttggtgctgtgggcactgctggtccatctggtcctagtggactcccaggagagaggggtgctgctggcataccaggagcaccacgagcaccatctctgccagggcaccagagacgtcagcatctcaagggcactgtggtatggaaaaggacgccacatgagtaaattttaaaaatataaatattttaaagggtaaaaatgagggtccctgtatttgaggatataaaagatgaaactgaagaagaaaagataggggaagaagaaaatgaagaagaccaggtcttctataagcctgttattgaagacttaagcatggaattggccagaaaatgcacggaactcattagcgatatcgttataaagaagagtttaaaaagctccaaggataagtgtacatttgtgactgacagtcctatgctaacccatgtaaaaaatatcggtgcttttatatctgaggcaaaatacaaaggcaccattaaagctgacctttctaattctctttataagcggatgccagccacaattgacagtgtttttgcaggagaagttacacagctccagagtgaggtggcctacaagcagaacatgatgctgccaaggattctcagttatgcccacatgaaggagccccctgaggttaaacatgccatggaggtcaataaacaccagagtaatatttcttataggaaagacgtgcaggacacccacacgtacagtgcagaacttgaccgaccagacatcaagatggcaacccagatctctaagatcataagcaatgcagaatacaagaaaggacaaggaataatgaataaagagcccgctgtaattggaagaccagattttgaacatgccgtggaagcttctaaactttctagtcaaattaaatacaaagaaaaatttgataatgaaatgaaggataagaaacatcattacaatcctcttgaaagtgcttcttttaggcagaatcagcttgctgctacactggcgagcaatgtgaagtacaagaaagacattcaaaatatgcatgatccagtttcagatctcccaaatttgttgtttttagaccatgttttgaaagccagcaaaatgctcagcggccgagaatataaaaagctctttgaggaaaacaaaggaatgtatcattttgatgcagatgctgtggaacatctgcaccataaaggcaatgccgtcctccaaagtcaggtgaaatataaagaagaatatgagaaaaataagggaaagccaatgcttgaatttgttgagacaccatcatatcaagcttcaaaggaggctcaaaagatgcaaagtgaaaaagtttacaaagaggattttgagaaggagattaaaggaaggtcatcactggatttagacaagactccagaatttttacatgtaaagtacatcaccaaccttctgagggagaaagaatataaaaaagatttggaaaatgagataaaagggaaaggaatggaacttaattcagaagttcttgatatccaaagagcaaagcagcctctgaaatggcaaggtgagaaagaatacaagaaagacctggagtcaataattaaagggaaaggaatgcaagctggcactgacacccttgaaatgcagcatgccaagaaggctgcagagatagcgagtgagaaagactataaaagagatctggagactgaaattaaagggaaagggatgcaggtgagcacagacactcttgatgtccagagagctaagaaagcatccgagatggccagccagaaacaatacaagaaggacttagaaaatgaaattaaagggaaaggaatgcaagtgagcatggatatcccagatatccttcgagccaagaggacatctgaaatctatagccagagaaagtataaagatgaagcagagaagatgctttctaactattctaccatagcagatactcctgaaattcagagaattaagacaactcaacaaaacattagtgcggtattttataagaaagaagtgggagctggcactgcagtgaaagatagcccagagatcgaacgagtgaagaaaaatcagcagaatattagttcagtgaaatacaaagaagagattaaacatgcaacagccatttctgatcctccagaactaaagagagttaaagaaaaccagaagaacatcagcaatctccagtataaagagcaaaactacaaggccactccggtaagcatgaccccggagatagagagagtgaggcgaaaccaggagcagctgagtgcggtaaaatataagggagaacttcaacggggaactgcaatttctgatccaccagagctgaagccaaaggaaaccaggaaaacttcagcatgtttattacagagttcagctggggagagtaccactttaagtgtaattcctgaaatggaaagagtgaaggagaatcaaggaaatattagctcggtaaaatatacccaggaccataaacagatgaaaggtagaccaagtctgattttagatacacctgctatgagacatgttaaagaagcacaaaatcatatttcaatggtaaaataccatgaagattttgaaaaaacaaaggggagaggctttactcccgtcgtggacgatcctgtgacagagagagtgaggaagaacacccaggtggtcagcgatgctgcctataaaggggtccaccctcacatcgtggagatggacaggagacctggaatcattgttgacctcaaagtttggcgcacagatcctggctccatcttcgaccttgatcccctggaagacaatattcagtctagaagtctccatatgctctctgaaaaggcgagtcactataggcgacactggtctcgatcccattccagcagtactttcggtacaggtctcggagacgacaggtcagaaatctcccgagatttacctagcttttcatgctgcagtgaggtaacaagaccgtctgatgaaggagcacctgttcttcccggagcctatcagcaaagccattcccaaggctatggctacatgcaccagaccagtgtgtcatccatgagatcaatgcagcattcaccaaatctaaggacctaccgagccatgtacgattacagtgcccaggatgaagacgaggtctcctttagagacggcgactacatcgtcaacgtgcagcctattgacgatggctggatgtacggcacagtgcagagaacagggagaacaggaatgctcccagcgaattacattgagtttgttaattaattatttctccctgccctttgagctttattctaatgtatccccaacctaatctttttaaaagatagaagatacttttaagacaacttggccattattttacaatgatgtatccttcctttgacaattagacacacaggtaccaggaagaaggaatgacctctgggctgaaaacagcagcattttcagtaattcctacaaacaaaaatctttgtgtctggacacctggtgctgctaattgtgttcatggtttcctttgattggctattgaaccctttctgggaaatgtatttttgtagactttaatagagaagttgattgtcccttaaatgtagtgtgtgtttgaaacttcttagctgtcactttggaatcaccccaagccaattctcttaactattcatgtagtaaggtgggaaccttcgcctgcggtagggccggcgttgttgggcctggccttcgggagcactctccgatccctcgttcttttcc

SEQ ID NO: 22800 - DNA, 1765 bp, Homo Sapiens
agctactcaggaggctgagacacgagaatcgcttgaacccgggaggcagaggttgcagtgagccgagatcacgccactagactccatccagcctgggcgaaagagcaagactccgtctcaaaaaaaaaaatcgttacaatttatggtggattactcccctctttttacctcatcaagacacagcactactttaaagcaaagtcaatgattgaaacgcctttctttcctaataaaagggagattcagtccttaagattaataatgtagtagttacacttgattaaagccatcctctgctcaaggagaagctggagaaggcattctaaggaaaaaggggcagggttggaactcggacgcatcccactgagccgagacaagattctgctgtagtcagtgctgcctgggaatctattttcacaaagttctccaaaaaatgtgatgatcaaaactaggaattagtgttctgtgtcttaggccctaaaatcttcctgtgaattccatttttaaggtagtcgaggtgaaccgcgtctggtctgcagaggatagaaaaaaggccctctgatacctcaagttagtttcacctttaaagaaggtcggaagtaaagacgcaaagcctttcccggacgtgcggaagggcaacgtccttcctcatggccggaaatggaactttaatttcccgttccccccaaccagcccgcccgagagagtgactctcacgagagccgcgagagtcagcttggccaatccgtgcggtcggcggccgctccctttataagccgactcgcccggcagcgcaccgggttgcggagggtgggcctgggaggggtggtggccattttttgtctaaccctaactgagaagggcgtaggcgccgtgcttttgctccccgcgcgctgtttttctcgctgactttcagcgggcggaaaagcctcggcctgccgccttccaccgttcattctagagcaaacaaaaaatgtcagctgctggcccgttcgcccctcccggggacctgcggcgggtcgcctgcccagcccccgaaccccgcctggaggccgcggtcggcccggggcttctccggaggcacctactgccaccgcgaagagttggctctgtcagccgcgggtctctcgggggcgagggcgaggttcaggcctttcaggccgcaggaagaggaacggagcgagtccccgcgcgcggcgcgattccctgagctgtgggacgtgcacccaggactcggctcacacatgcagttcgctttcctgttggtggggggaacgccgatcgtgcgcatccgtcacccctcgccggcagtgggggcttgtgaacccccaaacctgactgactgggccagtgtgctgcaaattggcaggagacgtgaaggcacctccaaagtcggccaaaatgaatgggcagtgagccggggttgcctggagccgttcctgcgtgggttctcccgtcttccgctttttgttgccttttatggttgtattacaacttagttcctgctctgcagattttgttgaggtttttgcttctcccaaggtagatctcgaccagtcccctcaacggggtgtgggagaacagtcatttttttttgagagatcatttaacatttaatgaatatttaattagaagatctaaatgaacattggaaattgtgttcctttaatggtcatcggtttatgccagaggttagaagtttcttttttgaaaaattagaccttggcgatgaccttgagcagtaggatataacccccacaagctt

SEQ ID NO: 22801 - DNA, 2417 bp, Homo Sapiens
ggtgaaactgctattgccggcggctcctgttttaccgcgtcacgatgctggtgcatttatttcgggtcgggattcggggtggcccattcccaggcaggctgctaccgcccctccgcttccagacattctcagctgtcaggtactctgatggctaccgcagctcctccctcctccgggccgtggcccacctgcggtcccagctctgggcccacctccctcgagcccccctagctcccagatggagcccctctgcctggtgctgggttgggggagccctgctaggccccatggtactgagtaagcatccccacctctgccttgtggccctgtgtgaggcagaagaggcccctcctgccagctccacaccccatgtcgtggggtctcgctttaactggaagctcttctggcagtttctgcacccccacctgctggtcctgggggtagccgtcgtgctggccttgggtgcggcactcgtgaatgtacagatccccctgctcctgggccagctggtaaaggtcgtggccaagtacacaagggaccacgtagggagtttcatgactgagtcccagaatctcagcacccacctgcttatcctctatggtgtccagggactgctgaccttcgggtacctggtgctgctgtcccacgttggcgagcgcatggctgtggacatgcggagggccctcttcagctccctgctccgacaaaacatcaccttctttgacgccaataagacagggcagctggtgagccgcttgacaactgacgtgcaggaatttaagtcatccttcaagcttgtcatctcccaggggctgcgaagctgctcccaggtggcaggctgcctggtgtccctgtccatgctgtcgacacgcctcacgctgctgctgatggtggccacaccagccctgatgggagtgggcaccctgatgggctcaggcctccgaaaattgtctcgccagtgtcaggaacatatcgccagggcaatgggcgtagcagacgaggccctgggcaatgtgcggactgtgcgagccttggccatggagcaacgggaagaggagcgctatggggcagagctggaagcctgccgctgccgggcagaggagctgggccgcggcatcgccttgttccaagggctttccaacatcgccttcaactgcatggtcttgggtaccctatttattgggggctcccttgtggccggacagcagctgacagggggagacctcatgtccttcctggtggcctcccagacagtgcaaaggtccatggccaacctctctgtcctgtttgggcaggtggtccgggggctgagtgcaggtgcccgggtctttgagtacatggccctgaacccctgcatcccactgtctgggggctgctgcgtccccaaagagcagctgcgtggctccgttacatttcagaacgtctgcttcagctacccctgccgccccggcttcgaggtgctgaaagacttcaccctgacgctgccccctggcaagatcgtggccctcgtgggccagtctggcggaggaaagaccaccgtggcttccctgctggagcgcttctacgaccccacggcaggcgtggtgatgctggatgggcgggacctgcgcacccttgacccctcctggctccggggccaggttgtcggtttcatcagccaggagcccgtcctgtttgggacgaccatcatggaaaacatccgctttgggaagctggaagcttccgatgaagaggtgtacacagccgcccgggaagcgaatgctcacgagttcatcaccagtttccccgagggctacaacacggtcgtcggtgaacggggcactaccctgtctgggggccagaagcagcgcctggccatcgcccgagcccttatcaagcagcccacggtgctgatactggatgaagctaccagcgcgctggatgcagagtccgagcgggttgtacaggaggccctggaccgggccagtgcaggccgcacggtgctggtaattgcccaccggctcagcactgtccgtggggcccactgcattgtcgtcatggccgatggccgtgtctgggaggctgggacacatgaagagctcctgaagaaaggcgggctatacgccgagctcatccggaggcaggccctggatgccccgaggacagcggccccaccgcccaaaaagccagaaggccccaggagccaccagcacaagtcctgagaagggccccctgaggtgtggtcgctgccaagcatcagtgttagggctggggctcagcctgggggagcctactggggactgagcccccaggagggccagcatgtggagagtcgctgcggctgctcctgctcacaataaagccggggccgagcagctggcaggggaggccaatccctccctcccctccccagtcctgccggctgcctccctcccacc

SEQ ID NO: 22802 - DNA, 4368 bp, Homo Sapiens
cgaaatgagagcaaaaagggagagagcaggaaagcgagcacaggcgagtacagtatacaaagtgttttgagtttctgactggcgtgccggaaagatcatgttagcacacccagaaactccacacgatgcagaccccagaggtaccagcagaaaggtcccctcgtagacggagtatctcagggaccagtacatcagagaaacccaactccatggacactgcaaatacctcacccttcaaagtaccaggattcttcagcaagcgcctgaaaggctccatcaagaggaccaaaagccagtcaaagcttgacagaaacacgagctttcggcttccatcccttcgcagtacagatgacaggtctcgtgggctgcctaaactaaaagagtcacgttcccatgaatccttgctgagcccatgcagcacagtggaatgtctggatcttggtagaggggaacctgtatcagtgaaaccacttcatagtagcatccttggacaagacttctgctttgaggttacctacttaagtggaagtaaatgcttcagctgtaattctgcttctgagagagacaagtggatggaaaaccttcgcaggacagttcaacctaataaggacaattgcaggcgagctgaaaatgttcttcgtttatggatcattgaagccaaggaccttgcccctaaaaagaaatatttctgcgaactgtgccttgatgataccctctttgctcgtacaaccagcaagaccaaagcagacaatattttctggggcgaacattttgaattcttcagccttccacctcttcatagtatcacagttcacatttacaaggatgtggaaaaaaagaaaaaaaaggacaagaataattatgtagggctagtcaacatccccactgccagtgtgactggtcgccaatttgtagaaaagtggtatccagtgagtacacctacacccaacaaaggaaagacaggaggaccttctattcggattaaatcacgtttccaaactatcaccattctgcctatggagcaatacaaagaatttgcagaatttgtcaccagcaactacaccatgctgtgttctgtccttgagccagtaattagtgtgagaaataaagaggagttggcttgtgccttagtgcacattcttcaaagtactggcagagccaaggattttctgactgacttggtgatgtctgaggtggatcgttgtggagagcatgatgtcttgatcttcagagagaacactattgccaccaaatccattgaggaatacctcaagttggtgggacaacagtatcttcatgacgcactgggggagtttatcaaagctttgtatgagtccgatgagaactgtgaagtggatcccagcaaatgttcatctagtgaactgatagaccatcagagcaacctgaaaatgtgctgtgagctggctttctgcaagatcatcaactcttactgtgttttccctcgtgagttgaaagaagtgtttgcatcatggaagcagcagtgcctgaaccgtggcaagcaagacatcagcgagaggctcatcagtgcctcattatttctccgttttctgtgtccagccattatgtctcccagtcttttcaaccttatgcaggagtatcctgatgaccgcacatctcggactctaactcttattgccaaggtcattcagaacctggccaactttgccaagtttggtaacaaagaggaatacatggcattcatgaatgattttttagaacatgaatggggtggaatgaagcgctttcttttggagatctctaatccagacaccatctcaaacaccccaggctttgatggttacattgatctgggccgagagctttcagttttgcattccttactgtgggaagtagtttcccaacttgataagggtgaaaattccttcctacaggcgaccgtggcaaaattggggcctctccctcgtgttcttgctgatattaccaagtcattgactaatcctacgccaatacaacagcaactgagacgcttcactgaacataactccagtccaaatgtcagtggaagcctctcctctgggctgcagaaaatatttgaagaccccactgacagtgatttgcataaactaaaatctccaagccaggacaacacagacagctacttcagagggaaaacattattgctggttcagcaagcctcctctcagagcatgacttattctgaaaaggatgaaagggaaagtagccttcctaatggtcggagcgtctccctcatggacctccaggacactcatgctgctcaagtggagcatgcatctgtcatgcttgatgtgcctatacgcttgaccggaagccagctttccataacccaggtggccagcatcaaacagctgcgggaaacccagagcactccccaaagtgcaccccaagtgagaaggcccctgcacccagccttgaaccagccaggtggccttcagcccttgtcgttccagaaccctgtctatcacctcaataacccaattccagcaatgccaaaggcctctatagattccagtttggagaacctaagcactgccagttccagaagccaaagtaacagtgaagacttcaagctcagtggacccagcaatagcagcatggaagatttcactaaacgtagcactcagagtgaggacttctccaggcggcacacggtgccagatagacacatacctcttgctttgccacgacaaaatagtactgggcaggcccagatccgaaaagtggaccagggtgggttaggtgcccgagccaaagccccaccatccctgccacacagtgcttctttacgtagcaccgggagcatgtcagtggtgtccgcagccctggtggccgaacctgtgcagaatgggagccggtcccggcagcagtcctcttcctccagagagagccctgttcccaaagttagagcaatccagagacaacagacacagcaggttcagtcacctgtggactctgccacaatgtccccagtagagaggacagcagcctgggttctgaacaatgggcagtatgaagaggatgtggaagaaactgagcaaaatctagatgaagccaagcatgctgagaagtatgaacaagaaattactaaactgaaggagcgcctgagagtttccagccggcgactggaggaatatgaacgccgcttgctggtgcaggagcagcagatgcagaagctgctgctggaatacaaggcccgactggaggacagcgaggagcggctccgaagacagcaggaagaaaaagatagccagatgaaaagcatcatcagcaggctaatggctgtggaagaggaactgaagaaggatcatgctgagatgcaagcagttattgatgcaaagcagaaaataattgatgcacaggaaaaacggatcgtgtccctggattcagccaacaccagactgatgagcgcgctgacccaagtgaaggagcggtacagcatgcaggtccgcaatggcatctcccccaccaaccccaccaagctttccatcacggagaatggtgaattcaaaaacagcagctgctgacgggctttgtctgtggaaggagacagaaggaaattgacccactctcctatctccagacctttacctagcccctccaggtttacagaatgttgctacttcacaatggcgatgtggtgagaaactcctgaatgaagaaaggaaccttgtctttcagggcataaggcggcgacttccaaggtcaatgcttttcccccacatctctatgtacatagggaacttagttctgggccatgtacagaaaatatcactgtaatataccaaaaggaagttaataatgtagattacctttttgattattgctatttttattattgttttcctcttgttgaaagcactgcagttgttacaggaagtaaagtaggaatgttgtgtgagcgagacatgagcctgtagttcagtaggtagagaccaagcatctatctgatagaacacatggagtgcaataggacattgtgagaaggatttttcagggattcatctactagtttaaaaaccccactctggccctcttgtcctttcagaaaacatgcaaataccaagatccatacaaaacaataatttattccactgatcaaccaagactggttctggttggacagctaatctgatttggggattcactgtttcagaggacacagacaaaagctgttgcatcaaaactggactttaggagtaatttctattgaactcctgtcaatatgtttatttcctctgtctacagcagatgggagtcttctcttttagacaggggctttttgtttttaaccccaattgtaataaagggtgttctttttcctctttagaaaaaaaaaaaaaaaaaaaa

SEQ ID NO: 22803 - DNA, 3946 bp, Homo Sapiens
cgagaaaaggtgacgcggggcccgggcaggcggccggcgcgcggccccccccccccccgccctggttatttggccgccttcgccggcagctcagggcagagtctcctggaaggcgcaggcagtgtggcgagaagggcgcctgcttgttctttctttttgtctgctttcccccgtttgcgcctggaagctgcgccgcgagttcctgcaaggcggtctgccgcggccgggcccggccttctcccctcgcagcgaccccgcctcgcggccgcgcgggccccgaggtagcccgaggcgccggaggagccagccccagcgagcgccgggagaggcggcagcgcagccggacgcacagcgcagcgggccggcaccagctcggccgggcccggactcggactcggcggccggcgcggcgcggcccggcccgagcgagggtggggggcggcgggcggcgcggggcggcggcgagcgggggccatgcaggcgcgctactccgtgtccagccccaactccctgggagtggtgccctacctcggcggcgagcagagctactaccgcgcggcggccgcggcggccgggggcggctacaccgccatgccggcccccatgagcgtgtactcgcaccctgcgcacgccgagcagtacccgggcggcatggcccgcgcctacgggccctacacgccgcagccgcagcccaaggacatggtgaagccgccctatagctacatcgcgctcatcaccatggccatccagaacgccccggacaagaagatcaccctgaacggcatctaccagttcatcatggaccgcttccccttctaccgggacaacaagcagggctggcagaacagcatccgccacaacctctcgctcaacgagtgcttcgtcaaggtgccgcgcgacgacaagaagccgggcaagggcagctactggacgctggacccggactcctacaacatgttcgagaacggcagcttcctgcggcggcggcggcgcttcaagaagaaggacgcggtgaaggacaaggaggagaaggacaggctgcacctcaaggagccgcccccgcccggccgccagcccccgcccgcgccgccggagcaggccgacggcaacgcgcccggtccgcagccgccgcccgtgcgcatccaggacatcaagaccgagaacggtacgtgcccctcgccgccccagcccctgtccccggccgccgccctgggcagcggcagcgccgccgcggtgcccaagatcgagagccccgacagcagcagcagcagcctgtccagcgggagcagccccccgggcagcctgccgtcggcgcggccgctcagcctggacggtgcggattccgcgccgccgccgcccgcgccctccgccccgccgccgcaccatagccagggcttcagcgtggacaacatcatgacgtcgctgcgggggtcgccgcagagcgcggccgcggagctcagctccggccttctggcctcggcggccgcgtcctcgcgcgcggggatcgcacccccgctggcgctcggcgcctactcgcccggccagagctccctctacagctccccctgcagccagacctccagcgcgggcagctcgggcggcggcggcggcggcgcgggggccgcggggggcgcgggcggcgccgggacctaccactgcaacctgcaagccatgagcctgtacgcggccggcgagcgcgggggccacttgcagggcgcgcccgggggcgcgggcggctcggccgtggacaaccccctgcccgactactctctgcctccggtcaccagcagcagctcgtcgtccctgagtcacggcggcggcggcggcggcggcgggggaggccaggaggccggccaccaccctgcggcccaccaaggccgcctcacctcgtggtacctgaaccaggcgggcggagacctgggccacttggcaagcgcggcggcggcggcggcggccgcaggctacccgggccagcagcagaacttccactcggtgcgggagatgttcgagtcacagaggatcggcttgaacaactctccagtgaacgggaatagtagctgtcaaatggccttcccttccagccagtctctgtaccgcacgtccggagctttcgtctacgactgtagcaagttttgacacaccctcaaagccgaactaaatcgaaccccaaagcaggaaaagctaaaggaacccatcaaggcaaaatcgaaactaaaaaaaaaaaatccaattaaaaaaaacccctgagaatattcaccacaccagcgaacagaatatccctccaaaaattcagctcaccagcaccagcacgaagaaaactctattttcttaaccgattaattcagagccacctccactttgccttgtctaaataaacaaacccgtaaactgttttatacagagacagcaaaatcttggtttattaaaggacagtgttactccagataacacgtaagtttcttcttgcttttcagagacctgctttcccctcctcccgtctcccctctcttgccttcttccttgcctctcacctgtaagatattattttatcctatgttgaagggagggggaaagtccccgtttatgaaagtcgctttctttttattcatggacttgttttaaaatgtaaattgcaacatagtaatttatttttaatttgtagttggatgtcgtggaccaaacgccagaaagtgttcccaaaacctgacgttaaattgcctgaaactttaaattgtgctttttttctcattataaaaagggaaactgtattaatcttattctatcctcttttctttctttttgttgaacatattcattgtttgtttattaataaattaccattcagtttgaatgagacctatatgtctggatactttaatagagctttaattattacgaaaaaagatttcagagataaaacactagaagttacctattctccacctaaatctctgaaaaatggagaaaccctctgactagtccatgtcaaattttactaaaagtctttttgtttagatttattttcctgcagcatcttctgcaaaatgtactatatagtcagcttgctttgaggctagtaaaaagatatttttctaaacagattggagttggcatataaacaaatacgttttctcactaatgacagtccatgattcggaaattttaagcccatgaatcagccgcggtcttaccacggtgatgcctgtgtgccgagagatgggactgtgcggccagatatgcacagataaatatttggcttgtgtattccatataaaattgcagtgcatattatacatccctgtgagccagatgctgaatagattttttcctattatttcagtcctttataaaaggaaaaataaaccagtttttaaatgtatgtatataattctcccccatttacaatccttcatgtattacatagaaggattgcttttttaaaaatatactgcgggttggaaagggatatttaatctttgagaaactattttagaaaatatgtttgtagaacaattatttttgaaaaagatttaaagcaataacaagaaggaaggcgagaggagcagaacattttggtctagggtggtttctttttaaaccattttttcttgttaatttacagttaaacctaggggacaatccggattggccctcccccttttgtaaataacccaggaaatgtaataaattcattatcttagggtgatctgccctgccaatcagactttggggagatggcgatttgattacagacgttcgggggggtggggggcttgcagtttgttttggagataatacagtttcctgctatctgccgctcctatctagaggcaacacttaagcagtaattgctgttgcttgttgtcaaaatttgatcattgttaaaggattgctgcaaataaatacactttaatttcagtcaaaaaaaaaaaaaaaaaaaaaaaaa

SEQ ID NO: 22804 - DNA, 2360 bp, Homo Sapiens
ggaagtgcctgcaaccttcgccgctgccttctggttgaagcactatggagggagagaggaagaacaacaacaaacggtggtatttcactcgagaacagctggaaaatagcccatcccgtcgttttggcgtggacccagataaagaactttcttatcgccagcaggcggccaatctgcttcaggacatggggcagcgtcttaacgtctcacaattgactatcaacactgctatagtatacatgcatcgattctacatgattcagtccttcacacggttccctggaaattctgtggctccagcagccttgtttctagcagctaaagtggaggagcagcccaaaaaattggaacatgtcatcaaggtagcacatacttgtctccatcctcaggaatcccttcctgatactagaagtgaggcttatttgcaacaagttcaagatctggtcattttagaaagcataattttgcagactttaggctttgaactaacaattgatcacccacatactcatgtagtaaagtgcactcaacttgttcgagcaagcaaggacttagcacagacttcttacttcatggcaaccaacagcctgcatttgaccacatttagcctgcagtacacacctcctgtggtggcctgtgtctgcattcacctggcttgcaagtggtccaattgggagatcccagtctcaactgacgggaagcactggtgggagtatgttgacgccactgtgaccttggaacttttagatgaactgacacatgagtttctacagattttggagaaaactcccaacaggctcaaacgcatttggaattggagggcatgcgaggctgccaagaaaacaaaagcagatgaccgaggaacagatgaaaagacttcagagcagacaatcctcaatatgatttcccagagctcttcagacacaaccattgcaggtttaatgagcatgtcaacttctaccacaagtgcagtgccttccctgccagtctccgaagagtcatccagcaacttaaccagtgtggagatgttgccgggcaagcgttggctgtcctcccaaccttctttcaaactagaacctactcagggtcatcggactagtgagaatttagcacttacaggagttgatcattccttaccacaggatggttcaaatgcatttatttcccagaagcagaatagtaagagtgtgccatcagctaaagtgtcactgaaagaataccgcgcgaagcatgcagaagaattggctgcccagaagaggcaactggagaacatggaagccaatgtgaagtcacaatatgcatatgctgcccagaatctcctttctcatcatgatagccattcttcagtcattctaaaaatgcccatagagggttcagaaaaccccgagcggccttttctggaaaaggctgacaaaacagctctcaaaatgagaatcccagtggcaggtggagataaagctgcgtcttcaaaaccagaggagataaaaatgcgcataaaagtccatgctgcagctgataagcacaattctgtagaggacagtgttacaaagagccgagagcacaaagaaaagcacaagactcacccatctaatcatcatcatcatcataatcaccactcacacaagcactctcattcccaacttccagttggtactgggaacaaacgtcctggtgatccaaaacatagtagccagacaagcaacttagcacataaaacctatagcttgtctagttctttttcctcttccagttctactcgtaaaaggggaccctctgaagagactggaggggctgtgtttgatcatccagccaagattgccaagagtactaaatcctcttccctaaatttctccttcccttcacttcctacaatgggtcagatgcctgggcatagctcagacacaagtggcctttccttttcacagcccagctgtaaaactcgtgtccctcattcgaaactggataaagggcccactggggccaatggtcacaacacgacccagacaatagactatcaagacactgtgaatatgcttcactccctgctcagtgcccagggtgttcagcccactcagcccactgcatttgaatttgttcgtccttatagtgactatctgaatcctcggtctggtggaatctcctcgagatctggcaatacagacaaaccccggccaccacctctgccatcagaacctcctccaccacttccaccccttcctaagtaaaaaaagaaaaagaagaggagaaaaaaacttctttaaaaaaacacataatttttcttttttttttggggaaaaaaaaattttttttaaaattttttccccaagggacgggggaaaattttatttttaaaatttttt

SEQ ID NO: 22805 - DNA, 1404 bp, Homo Sapiens
tcaggggtaggagcgggagccgagaggaggcggaggagatggcgtcccagccgccacctccccccaaaccctgggagacccgccgaattccgggagccggaccgggaccaggaccgggccccactttccaatctgctgatttgggtcctactttaatgacaagacctggacaaccagcacttaccagagtgcccccacctattcttccaaggccatcacagcagacaggaagtagcagtgtgaacacttttagacctgcttacagttcattttcttctggatatggtgcctatggaaattcattttatggaggctatagtccttatagttatggatataatgggctgggctacaaccgcctccgtgtagatgatcttccacccagtagatttgttcagcaagctgaagaaagcagcaggggtgcatttcagtccattgaaagtattgtgcatgcatttgcctctgtcagtatgatgatggatgctaccttttcagctgtctataacagtttcagggctgtattggatgtagcaaatcacttttcccgattgaaaatacactttacaaaagtgttttcagcttttgcattggttaggactatacggtatctttacagacggctacagcggatgttaggtttaagaagaggctctgagaatgaagacctctgggcagagagtgaaggaactgtggcatgccttggtgctgaggaccgagcagctacctcagcaaaatcttggccaatattcttgttctttgctgttatccttggtggtccttacctcatttggaaactattgtctactcacagtgatgaagtaacagacagcatcaactgggcaagtggtgaggatgaccatgtagttgccagagcagaatatgattttgctgccgtatctgaagaagaaatttctttccgggctggtgatatgctgaacttagctctcaaagaacaacaacccaaagtgcgtggttggcttctggctagccttgatggccaaacaacaggacttatacctgcgaattatgtcaaaattcttggcaaaagaaaaggtaggaaaacggtggaatcaagtaaagtttccaagcagcaacaatcttttaccaacccaacactaactaaaggagccacggttgctgattctttggatgaacaggaagctgcctttgaatctgtttttgttgaaactaataaggttccagttgcacctgattccattgggaaagatggagaaaagcaagatctttgatatctttcatgtttgcctgcagttgaacaatactttagagtactttttaaaattatttctcacaaagaaatgaatgtacaatccaatgaaaacatttgttattggctatttcaggtgttttgctgctagaaattattaaagttacacactagta

SEQ ID NO: 22806 - DNA, 2329 bp, Homo Sapiens
gcaggggccgagtctctcggaagccctcgtgaggactcggacctattcggactgattcggcttcccacttcggggaacttcgaccctcctcggttcaggactcggtctcggctcggcggcttcgtgcaggttcggctcctactcgggcagcctctgttcgcctcggctccgctccgcgggcggactcggctcggctctgctcggcggctggctgccttttcggtccctattcgggcggcggcttcgggcggcctcggcccagctcgggcgtcctcttcgggccccgcttcgggctccgcgaccggcgcttcgggcggtcccggacggcgccttcgggaaggctcggcggagtccggatggaggactcggactcggcggcaaagcagctgggcctggctgacgcggccgcggcaggaggcgaggcggaggagccggtgctgagcagggacgaggactcggaggaggacgcagactcggaggcggagcgggagacgccgcgggtcacggcagtggcggtgatggcggcggagcccgggcacatggacatgggcgccgaggccctgcccggccccgacgaggccgccgctgccgcagccttcgcagaggtgaccacagtgacagtggccaacgtgggggctgctgcagacaatgtcttcaccacgtctgtggcgaacgcggcatccatctcaggacatgttctgtctggtaggacggcccttcagatcggggacagcctgaacaccgaaaaagcgacactgattgtcgtccacacagatgggagcatcgtggagaccaccgggctgaaaggcccggcagctcccctcaccccaggtcctcagtctcctccaacccctctggctcccggccaagaaaaaggtggaactaaatacaactgggacccttctgtgtacgacagtgagctgcccgtacggtgccggaacatcagcggcactctgtacaagaacaggctcggctcaggcggccggggacggtgcatcaagcagggggagaactggtacagtcccaccgagtttgaggccatggcaggaagagccagcagtaaggactggaaaagaagcattcgctacgcgggccgacccttgcagtgcctcatccaggatgggatcttaaaccctcacgctgcctcttgcacctgtgctgcctgctgcgacgacatgaccttaagtggcccagtcaggctttttgtgccttacaaaaggcgcaagaaggagaatgaactgcccacaactcccgtgaagaaggactcccccaagaacatcacattgcttccagccaccgcggctaccaccttcaccgtgaccccctcgggacagatcacgacctcgggggcactgacctttgaccgagcgtccacggtagaggccactgctgtcatatcagagagtccggcccagggcgacgtcttcgcaggggccacagtccaagaggccagcgtgcagcccccatgcagggccagccaccctgagcctcactaccccggctatcaggacagctgccagatcgcaccgtttccagaagctgcgttgccaacgtcacatcccaaaatagtgttgacatccctgcctgcgctggcggtcccacccccgactcccaccaaagcggcacctcccgcgttggtcaatgggctggagctgtcagagccgcggagctggctgtacctagaagagatggtcaactccttgctcaacacagcgcagcagctgaagacgctgtttgagcaagccaagcatgccagcacctaccgagaagctgccacaaaccaggccaagatccacgctgacgcagagcggaaggagcagtcctgcgttaactgcggccgggaggctatgagcgagtgcaccggctgccacaaggtcaactactgctccaccttctgccaacgcaaggactggaaggatcaccagcacatatgcggccagtcagcagctgtcaccgtccaggcagacgaagtccacgtggctgaaagcgtgatggagaaggtgaccgtgtgaggctccatcggccgccctgggagctggggcccctcgcactcctgtgaggcttttgcaggtcgaaggcccccctgaggactctggggggacgttgagaagaggggtgtgggaaggtaaagaaacttgctggacaagtcattaacacactttaagcgaatggtgccctgggaagcgcactccccctgcccgggccccctgcccgctcgcggacagattttttatccctgggatcatgagcgtccggtctggcccacagggcctgtgctgcgacgcacatacatacgtgttgtgtctgtcaataaagtgtaaataaggtc

SEQ ID NO: 22807 - DNA, 898 bp, Homo Sapiens
caaggctacaggtgtctttatttccactgcacgctggtgctgggagcgcctgccttctcttgccttgaaagcctcctctttggacctagccaccgctgccctcacggtaatgttggactcggtgacacacagcaccttcctgcctaatgcatccttctgcgatcccctgatgtcgtggactgatctgttcagcaatgaagagtactaccctgcctttgagcatcagacagcctgtgactcatactggacatcagtccaccctgaatactggactaagcgccatgtgtgggagtggctccagttctgctgcgaccagtacaagttggacaccaattgcatctccttctgcaacttcaacatcagtggcctgcagctgtgcagcatgacacaggaggagttcgtcgaggcagctggcctctgcggcgagtacctgtacttcatcctccagaacatccgcacacaaggttactccttttttaatgacgctgaagaaagcaaggccaccatcaaagactatgctgattccaactgcttgaaaacaagtggcatcaaaagtcaagactgtcacagtcatagtagaacaagcctccaaagttctcatctatgggaatttgtacgagacctgcttctatctcctgaagaaaactgtggcattctggaatgggaagatagggaacaaggaatttttcgggtggttaaatcggaagccctggcaaagatgtggggacaaaggaagaaaaatgacagaatgacatatgaaaagttgagcagagccctgagatactactataaaacaggaattttggagcgggttgaccgaaggttagtgtacaaatttggaaaaaatgcacacgggtggcaggaagacaagctatgatctgctccaggcatcaagctc

SEQ ID NO: 22808 - DNA, 2968 bp, Homo Sapiens
tgaaggcacaggctgaatctgttgcggcagctgaggctacaacaggcctgcgccggcggcagagaggatatcttgggcgggggatgtgagcgctgagcccttggcagaagtcaatgtgattttaatttgaagcaaaactgaaatgggttcttcttcctcattctattcatgttgctttttgatggccatggcataaggaactctatcccaggaatacagctttgcattagcaccgaacaagatttgtgatgaaatggagcctggaacaaactcttttcgggtagaatttcctgatttttccagcaccattctacagaaactgaaccagcagcgccagcaaggacaattatgtgacgtctccattgttgtccaaggccacattttccgggcacacaaagccgttcttgctgccagttcaccctacttttgtgaccaggtactcctgaaaaacagcaggagaattgttttgcctgatgtgatgaacccaagagtgtttgagaacattctcctatctagttatacaggacgtctagtaatgcccgctccagaaattgttagttacttgacagcggcaagcttcctccagatgtggcatgtggtagacaaatgcactgaagttttagagggaaaccctacagtcctttgtcagaagctaaatcatggcagtgaccaccagtcaccaagcagcagtagttataatggcctggtagagagctttgagctgggctctgggggtcatactgattttcccaaagcccaagaactgagagatggtgaaaatgaagaggagagcaccaaagacgagctgtcatcccagctcaccgagcacgaatacctgcccagcaactcgtccacagagcatgaccgcctgagcacggaaatggcaagccaggatggggaggagggcgccagcgacagcgccgagttccactacacccggcccatgtacagcaagcccagcatcatggctcacaaacgctggatccacgtgaagcccgagcgcttagaacaggcttgcgagggcatggatgtgcacgcgacctacgacgagcaccaggtcacagagtccatcaacaccgtgcagacagagcacacggtgcagccttcgggagtggaggaggacttccacatcggggagaagaaagtggaagctgagtttgatgaacaggctgatgaaagcaattatgatgagcaggtggatttctatggctcttccatggaagagttttccggagagaggtcagatgggaatctaattgggcacagacaggaggctgccctcgcagcaggttacagtgagaatattgaaatggtaacagggattaaagaagaagcttcccacttaggattctcagccaccgacaagctgtatccttgtcagtgtgggaaaagtttcactcacaagagtcagagagatcggcacatgagcatgcacctcggtcttcggccttacggctgtggggtctgcggtaagaaattcaaaatgaagcaccatctcgtgggccacatgaaaattcacacaggcataaagccgtatgagtgtaatatctgtgcaaagaggtttatgtggagggacagtttccaccggcatgtgacttcttgtactaagtcctacgaagctgcaaaggctgagcagaatacaactgaggctaactaaaaataggatctggcccttgagtggcatgcacaaaaataaactatggtaattaatgcaaatctgggcacagatgatgcgtgctacttgctattatgagagaagcttaaaaaaaaaaaggaagatatttctgaaagaccagctctaagtaggccaattaaaaaaatctaattcctcaaatttgtgtgttccagtcctggcctgggagtgggtaatggggtgagttaacccaccgcccagctggcaagggaaaccttctgactggttgtgatcgaaacaggtggacagagacacctgcacttggaactggactccacccaccagttccattttgggtggcagcagctttggatcactcattattacaaggtcatgctgaaattttattttgctcttgctatagatacttaggtaatgtggatttgttttggtagctatttcactgaaggaagtgctacttatataaaagctagaaataatgtgattcctaggatgagaaattggttaacagagctctgttgtctggttttagtctttctaaaggatattttaactaaaactatggagatgctaagagagtgactttctaaatatgaaacagataatttacggtacacaggctgacatagtgcccttgtcagtttctgtaagatgccactactgtcacaaggtgtttcagactcttgataaggcagtgttttgtattttagttctaacattgagtttggacaattttatctaattgtaattctctagggtgccagagataggtatttctcattggtttgctttcccaaatcctgtttggttaattgtagcctccatacagtggggtcttctctgtggctggtagacaccaagctgctgtgactgaccacggtaccacgggctgccacagcccctgctctgtcttagattatggtgctttacaaagagagtggtccatgaccacacttagtgagaaggagccacaagttgtggctgagagttccctgtgaacttgagtagttcatagagtgctaaggtgacactccaccaaccagagtgagagggcagataggcaggattctatgagtggttatacttaagggggacaaaactgcccaagaagaatcttgagaatacactctttcaaggtgggggagatactctttagagggtacactgagctaatactaccagttctttatgagcactggaatgtgtttgtaaaaggagtcctaagtttagcaaggtagtctacagaaccatgctcccacattatagataaagctgcttaaacttaaaagtccacaaagctacgccgaccagaaa

SEQ ID NO: 22809 - DNA, 3185 bp, Homo Sapiens
ggagtctcgcgaggatcttgtgacttatcgcggcatcgcccagcggttgccgggaaagggggtgggttccgggggcgggcgcctggtcccggagtcgccgctgggcctgtccgctggcgtcatggcaccgaaaaagaaagggaagaaaggcaaagccaaaggcaccccgattgtcgatgggctcgctccagaggacatgagcaaggagcaggtggaggagcatgtcagccgcatccgggaggagctggaccgcgagcgggaggaacgaaactacttccagctggagcgggacaagatccacaccttctgggagatcacacggaggcagctggaggagaagaaggctgagctgcggaacaaagaccgggagatggaagaagccgaggagaggcaccaggtggagatcaaggtgtacaagcagaaagtgaagcacctgctatatgagcaccagaacaacctgacagagatgaaggctgagggcactgtagtcatgaagctggcacagaaagagcaccgcatacaggagagtgtgctgcgcaaggacatgcgggcactgaaggtggagctcaaggagcaggagctggccagtgaggtggtggtgaagaacctgcggctgaaacacaccgaggagatcaccaggatgcggaatgattttgagaggcaagttcgagaaattgaggccaagtatgataagaagatgaagatgctgagggacgaactcgacttgcggagaaagactgagctccacgaagtggaggagaggaagaatggccagatccacacgctgatgcagcgccacgaggaggccttcaccgacattaagaactactacaacgacatcaccctcaacaacctggccctcatcaactccctcaaggagcagatggaggacatgcggaagaaggaggaccacctggagagggagatggcagaggtgtctgggcagaacaagcgcctggcagaccctctccagaaggctcgggaggagatgagcgagatgcagaaacagctcgcaaactacgagagggacaagcagatcctgctttgcacaaaagcccgtttgaaagtcagggagaaagagctgaaagacctgcagtgggagcatgaagtgttagagcagcgattcaccaaggtgcagcaggagcgggacgagctctatcggaagttcaccgcagccatccaggaggtgcagcagaagacagggttcaagaacctcgtgctagaacgcaagctgcaggctctgagcgccgctgtggagaagaaggaggtgcagttcaacgaggtcctggctgcctctaacctggaccctgcagccctgacgctggtgtcccgcaagctggaggatgttcttgagtcgaagaacagcaccatcaaggacctgcagtatgagctggcccaggtctgtaaggcccataacgacctgctgcgcacgtatgaggcaaagctgctggccttcgggatccctctggacaacgtgggcttcaagcccttggaaacagctgtgatcggacagacgctgggccagggccccgcgggactggtgggcaccccgacgtagctgccccccctggggggccacagcccagagaaccagcctaggaacactcgggatgacaccccttatcacaccaaggacagcaagttttttagattttatcatcagcaaatgaaagcttttcacatgttcttgccatcctctttcctggctctgtggaggagaaccacctgcaggaccctcacccatggtgtccctgtcgctcccttccctgggtgccgcacgtccagcctgtgtccaggcctactccctggtctcacctccgaccacagtcggcggcaccttctcagagtgccccgcactcacctgggggttggggcaatgccgcgctgtgctgcctgtcttcgcgccactgttgtcccaccgaatggacagctttgcaggtgctggcactaacttcattgacacctgagtcacagctgcccagtgggattctccagggggccgggacttccctaggaagtggtgagccaatgctccctgatgagcacaaagcccgctctgttgagggctgggtgggtgcagccagcgtgcgggaacgggcaggcagcctcccgctgccagtcttcgctctaactccctcggtaggtgatgtaggaccaggggcacgtggaacttctgggccttgctggtgatggttaaaacaacctgagatggagaggccaggagagagtataaggggatagcagcaaaccacctatctggccccaacacacctgagagaattcagcagcccagactgagggtctgggatggggtgaaccttccgcaccagagggacactccacagaagccacagcccagtaagtcaggcgcttctgcggcggctccagtgtggggtgaggcagtgaggttaggcccagagagctggagttggctcagatgaaaacctctgtcaacaaagaggggatgaatcacccttggcccagcctccccacaaagcctgaccctgggcaggtgagtgacgggtgtgtcctcgtagagtctattgctgcctggacacctttcttttgggagctcaaagcaagtgagctcacctacctgccaccgcccaggaccagtctgcccactgcctaaatgatgcccggccagcaggacctggcctgcagatcccagtgagtcatgagcctcagccccctccagcccactggggctctcacctccacatgtgggtagaagctttcctgccccctcttcctctagtagccctcagtgtcgaaggtgagcttgtaggtgcctgccttcatctggtccaggacagtgaccatctgggtctgtgtagctggggagagaatgaggctgcagagatggggaccagaagccccccaccccagctttcctgggtctgcatcccagtgggcctcagacactgccctgccacctgtcagacttgggtgagcagacacagtgaggctgttaggtcctgcagttccagagcagtctagggacaccactgccctgtctttaggaaatcacaacacagagaagcaaaaagggaaaaagtctcccacaatttatcccatgagcaagaaccactttatagctggcatatatttttccagattttctctatgcataagtatatttgtttaaaaacttataaagtggattatactatttgtattgtttt

SEQ ID NO: 22810 - DNA, 4412 bp, Homo Sapiens
agccccggttacgcggttgcacgtcggccccagccctgaggagccggaccgatgtggaaactgctgcccgccgcgggcccggcaggaggagaaccatacagacttttgactggcgttgagtacgttgttggaaggaaaaactgtgccattctgattgaaaatgatcagtcgatcagccgaaatcatgctgtgttaactgctaacttttctgtaaccaacctgagtcaaacagatgaaatccctgtattgacattaaaagataattctaagtatggtacctttgttaatgaggaaaaaatgcagaatggcttttcccgaactttgaagtcgggggatggtattacttttggagtgtttggaagtaaattcagaatagagtatgagcctttggttgcatgctcttcttgtttagatgtctctgggaaaactgctttaaatcaagctatattgcaacttggaggatttactgtaaacaattggacagaagaatgcactcaccttgtcatggtatcagtgaaagttaccattaaaacaatatgtgcactcatttgtggacgtccaattgtaaagccagaatattttactgaattcctgaaagcagttgagtccaagaagcagcctccacaaattgaaagtttttacccacctcttgatgaaccatctattggaagtaaaaatgttgatctgtcaggacggcaggaaagaaaacaaatcttcaaagggaaaacatttatatttttgaatgccaaacagcataagaaattgagttccgcagttgtctttggaggtggggaagctaggttgataacagaagagaatgaagaagaacataatttctttttggctccgggaacgtgtgttgttgatacaggaataacaaactcacagaccttaattcctgactgtcagaagaaatggattcagtcaataatggatatgctccaaaggcaaggtcttagacctattcctgaagcagaaattggattggcggtgattttcatgactacaaagaattactgtgatcctcagggccatcccagtacaggattaaagacaacaactccaggaccaagcctttcacaaggcgtgtcagttgatgaaaaactaatgccaagcgccccagtgaacactacaacatacgtagctgacacagaatcagagcaagcagatacatgggatttgagtgaaaggccaaaagaaatcaaagtctccaaaatggaacaaaaattcagaatgctttcacaagatgcacccactgtaaaggagtcctgcaaaacaagctctaataataatagtatggtatcaaatactttggctaagatgagaatcccaaactatcagctttcaccaactaaattgccaagtataaataaaagtaaagatagggcttctcagcagcagcagaccaactccatcagaaactactttcagccgtctaccaaaaaaagggaaagggatgaagaaaatcaagaaatgtcttcatgcaaatcagcaagaatagaaacgtcttgttctcttttagaacaaacacaacctgctacaccctcattgtggaaaaataaggagcagcatctatctgagaatgagcctgtggacacaaactcagacaataacttatttacagatacagatttaaaatctattgtgaaaaattctgccagtaaatctcatgctgcagaaaagctaagatcaaataaaaaaagggaaatggatgatgtggccatagaagatgaagtattggaacagttattcaaggacacaaaaccagagttagaaattgatgtgaaagttcaaaaacaggaggaagatgtcaatgttagaaaaaggccaaggatggatatagaaacaaatgacactttcagtgatgaagcagtaccagaaagtagcaaaatatctcaagaaaatgaaattgggaagaaacgtgaactcaaggaagactcactatggtcagctaaagaaatatctaacaatgacaaacttcaggatgatagtgagatgcttccaaaaaagctgttattgactgaatttagatcactggtgattaaaaactctacttccagaaatccatctggcataaatgatgattatggtcaactaaaaaatttcaagaaattcaaaaaggtcacatatcctggagcaggaaaacttccacacatcattggaggatcagatctaatagctcatcatgctcgaaagaatacagaactagaagagtggctaaggcaggaaatggaggtacaaaatcaacatgcaaaagaagagtctcttgctgatgatctttttagatacaatccttatttaaaaaggagaagataactgaggattttaaaaagaagccatggaaaaacttcctagtaagcatctacttcaggccaacaaggttatatgaatatatagtgtatagaagcgatttaagttacaatgttttatggcctaaatttattaaataaaatgcacaaaactttgattcttttgtatgtaacaattgtttgttctgttttcaggctttgtcattgcatctttttttcatttttaaatgtgttttgtttattaaatagttaatatagtcacagttcaaaattctaaatgtacgtaaggtaaagactaaagtcacccttccaccattgtcctagctacttggttcccctcagaaaaaaattcatgatactcatttcttatgaatctttccagggatttttgagtcctattcaaattcctatttttaaataatttcctacacaaatgatagcataacatatgcagtgttctacaccttgcttttttacttagtagattaaaaattataggaatatcaatataatgtttttaatattttttcttttccattatgctgtagtcttacctaaactctggtgatccaaacaaaatggcttcagtggtgcagatgtcacctacatgttattctagtactagaaactgaagaccatgtggagacttcatcaaacatgggtttagttttcaccagaatggaaagacctgtacccctttttggtggtcttactgagctgggtgggtgtctgttttgagcttatttagagtcctagttttcctacttataaagtagaaatggtgagattgttttctttttctaccttaaagggagatggtaagaaacaatgaatgtcttttttcaaactttattgacaagtgattttcaagtctgtgttcaaaaatatattcatgtacctgtgatccagcaagaagggagttccagtcaagagtcactacaactgattagttgtttagagaatgagaaatggaacagtgaggaatggaggccatatttccatgacttcccttgtaaacagaagcaacagaagggacaagaggctggcctctacatcactctcaccttccaaatcttgtggaagtgcatctacttgccagaaccaaattaacttacttccaagttctggctgcttgcaggtggaactccagctgcaagggagttagggaaatgaaggtctttttttaaaagcttctcagccttcctagggaacagaaattgggtgagccaatctgcaatttctactacaggcattgagaccagttagattattgaaatattatagagagttatgaacacttaaattatgatagtggtatgacattggatagaacatgggatactttagaagtagaattgacagggcatattagttgatgaaatggagtcatttgagtctcttaatagccatgtatcataattaccaagtgaagctggtggaacatatggtctccattttacagttaaggaatataatggacagattaatattgttctctgtcatgcccacaatccctttctaaggaagactgccctactatagcagtttttatatttgtcaatttatgaatataatgaatgagagttctggtacctcctgtctttacaaatattggtgttgtcagtatttttcctttttaaccattccaatcggtgtgtagtgatgtttcattttggttttaatttgtatatccctgatagctataattgggtcatagaaattctttatacattctagatgcaagtctcttgtcggatatatgtattgagatattacacctagtctgtggcttgactgttttctttatgtcttttgatgaatagaagttttaaattttgacaaggtcaaatttatttttttcttttgtttgatattttttctctccaatttaaccccaagatttcagatattctgctctattatataaactttatatttttatatttgtgatctaccttgaattgatatgtatgttgtgaattatggatcagggttctttttttcccccatacaagtatccagtcattgtaacactgtttattgaaagaattatcctttcctcattaaattaccttgccaattagtaaaaaatcaattaaccat

SEQ ID NO: 22811 - DNA, 5678 bp, Homo Sapiens
taaccacgaaagaggaatcgatgctcagcttttagttgcacttcctaaagttgcagaattaagacaaatctttgaaccaaagaagaaagaattcttagaaatgaaaagaaaagaaagaattgccaggcgcctggaagggattgaaaatgacactcagcccatcctcttgcagagctgcacaggattggtgactcaccgcctgctggaggaagacacccctcgatacatgagagccagcgaccctgccagcccccacatcggccgatcaaatgaagaggaggaaacttctgattcttctctagaaaagcaaactcgatccaaatactgcacagaaacctccggtgtccacggtgactcaccctatggttcgggtaccatggacacccacagtctggagtccaaagccgaaagaattgcaaggtacaaagcagaaagaaggcgacagctggcagagaagtatgggctgactctggatcccgaggccgactccgagtatttatcccgctataccaagtccaggaaggagcctgatgctgtcgagaagcggggaggaaaaagtgacaaacaggaagagtcaagcagagatgckagttctctgtaccccgggaccgagacgatggggctcaggacctgtgccggtgaatccaaggactatgccctccatgtgggtgacggctcttccgacccggaggtgctgctgaacatagaaaaccaaagacgaggtcaagagctgagtgccacccggcaggcccatgacctgtccccagcagccgagagttcctcgaccttctctttctctgggcgagactcctccttcactgaagtgccacggtcccccaagcacgcccacagctcctccctgcagcaggcagcctcccggagcccctcctttggtgacccacagctatcccctgaggcccgacccaggtgcacttcacattcagaaacgccaactgtcgatgatgaagaaaaggtggatgaacgagccaagctgagcgtcgccgccaagaggttgcttttcagggagatggaaaaatcttttgatgaacaaaatgttccaaagcgacgctcaagaaacacagctgtggagcagaggctacgccgtctgcaggacaggtccctcacccagcccatcaccactgaagaggtggtcatcgcagccacattgcaggcctctgctcaccaaaaggccttagccaaggaccagacaaatgagggcaaagagcttgctgagcaaggagaacctgattcctccactctaagcttggccgaaaagttggccttgtttaacaaattgtcccagccagtctcaaaagcgatttctacccggaacagaatagacacgagacagaggagaatgaacgctcgctatcaaactcagccagtcacactgggagaggtggagcaggtgcagagtggaaagctcattcctttctcacctgccgtgaacacatcagtgtctaccgtagcatccacggttgctccaatgtatgccggagatcttcgcacaaagccacctcttgaccacaatgcaagtgccactgactataagttttcttcttcaatagaaaattcggactctccagttagaagcattctgaaatcgcaagcttggcagcctttggtagagggtagcgagaacaagggaatgttgagagaatatggagagacagaaagcaagagagctttgacaggtcgagacagtgggatggagaagtatgggtcctttgaggaagcagaagcatcctaccccatcctgaaccgagccagggaaggagacagccataaggaatctaaatatgctgttcccagaagaggaagcctggaacgggcgaaccctcccatcacccacctcggggatgaaccgaaggaattttccatggctaaaatgaatgcacaaggaaacttggacttgagggacaggctgccctttgaagagaaggtggaggtggagaatgttatgaaaaggaagttttcactaagagcggcagagttcggggagcccacttccgagcagacggggacagctgctgggaaaactattgctcaaaccacagcccccgtgtcctggaagccccaggattcttcggaacagccacaggagaagctctgcaagaatccatgtgcgatgtttgctgctggagagatcaaaacgccgacaggggagggccttcttgactcacccagcaaaaccatgtctattaaagaaagattggcactgttgaagaaaagcggggaggaagattggagaaacagactcagcaggaggcaggagggcggcaaggcgccggccagcagcctgcacacccaggaagcagggcggtccctcatcaagaagcgggtcacagaaagtcgagagagccaaatgacgattgaggagaggaagcagctcatcactgtgagagaggaggcctggaagacgagaggcagaggagcggccaacgactcgacccagttcactgtggctggcaggatggtgaagaaaggtttggcgtcacctactgccataaccccagtagcctcagccatttgcggtaaaacaagaggcaccacacccgtttccaaacccctggaagatatcgaagccagaccagatatgcagttagaatcggacctgaagttggacaggctggaaacctttctaagaaggctgaataacaaagttggcgggatgcacgaaacggtgctcactgtcaccggcaaatctgtgaaggaggtgatgaagccagatgatgatgaaacctttgccaaattttaccgcagcgtggattataatatgccaagaagtcctgtggagatggatgaggacttcgatgtcattttcgatccttatgcacccaaattgacgtcttccgtggccgagcacaagcgggcagttaggcccaagcgccgggttcaggcctccaaaaaccccctgaaaatgctggcggcaagagaagatctccttcaggaatacactgagcagagattaaacgttgccttcatggagtcaaagcggatgaaagtagaaaagatgtcttccaactccaacttctcagaagtcaccctggcgggtttagccagtaaagaaaacttcagcaacgtcagcctgcggagcgtcaacctgacggaacagaactctaacaacagcgccgtgccctacaagaggctgatgctgttgcagattaaaggaagaagacatgtgcagaccaggctggtggaacctcgagcttcggcgctcaacagtggggactgcttcctcctgctctctccccactgctgcttcctgtgggtaggagagtttgcaaacgtcatagaaaaggcgaaggcctcagaacttgcaactttaattcagacaaagagggaacttggttgtagagctacttatatccaaaccattgaagaaggaattaatacacacactcatgcagccaaagacttctggaagcttctgggtggccaaaccagttaccaatctgctggagacccaaaagaagatgaactctatgaagcagccataatagaaactaactgcatttaccgtctcatggatgacaaacttgttcctgatgacgactactgggggaaaattccgaagtgctcccttctgcaacccaaagaggtactggtgtttgattttggtagtgaagtttacgtatggcatgggaaagaagtcacattagcacaacgaaaaatagcatttcagctggcaaagcacttatggaatggaacctttgactatgagaactgtgacatcaatcccctggatcctggagaatgcaatccgcttatccccagaaaaggacaggggcggcccgactgggcgatatttgggagacttactgaacacaatgagacgattttgttcaaagagaagtttctggattggacggaactgaagagatcgaatgagaagaaccccggggaacttgcccagcacaaggaagaccccaggactgatgtcaaggcatacgatgtgacacggatggtgtccatgccccagacgacagcaggcaccatcctggacggagtgaacgtcggccgtggctatggcctggtggaaggacacgacaggaggcagtttgagatcaccagcgtttccgtggatgtctggcacatcctggaattcgactatagcaggctccccaaacaaagcatcgggcagttccatgagggggatgcctatgtggtcaagtggaagttcatggtgagcacggcagtgggaagtcgccagaagggagagcactcggtgagggcagccggcaaagagaagtgcgtctacttcttctggcaaggccggcactccaccgtgagtgagaagggcacgtcggcgctgatgacggtggagctggacgaggaaaggggggcccaggtccaggttctccagggaaaggagcccccctgtttcctgcagtgtttccagggggggatggtggtgcactcggggaggcgggaagaggaagaagaaaatgtgcaaagtgagtggcggctgtactgcgtgcgtggagaggtgcccgtggaagggaatttgctggaagtggcctgtcactgtagcagcctgaggtccagaacttccatggtggtgcttaacgtcaacaaggccctcatctacctgtggcacggatgcaaagcccaggcccacacgaaggaggtcggaaggaccgctgcgaacaagatcaaggaacaatgtcccctggaagcaggactgcatagtagcagcaaagtcacaatacacgagtgtgatgaaggctccgagccactcggattctgggatgccttaggaaggagagacaggaaagcctacgattgcatgcttcaagatcctggaagttttaacttcgcgccccgcctgttcatcctcagcagctcctctggggattttgcagccacagagtttgtgtaccctgcccgagccccctctgtggtcagttccatgcccttcctgcaggaagatctgtacagcgcgccccagccagcacttttccttgttgacaatcaccacgaggtgtacctctggcaaggctggtggcccatcgagaacaagatcactggttccgcccgcatccgctgggcctccgaccggaagagtgcgatggagactgtgctccagtactgcaaaggaaaaaatctcaagaaaccagcccccaagtcttaccttatccacgctggtctggagcccctgacattcaccaatatgtttcccagctgggagcacagagaggacatcgctgagatcacagagatggacacggaagtttccaatcagatcaccctcgtggaagacgtcttagccaagctctgtaaaaccatttacccgctggccgacctcctggccaggccactcccggagggggtcgatcctctgaagcttgagatctatctcaccgacgaagacttcgagtttgcactagacatgacgagggatgaatacaacgccctgcccgcctggaagcaggtgaacctgaagaaagcaaaaggcctgttctgagtggggagacgccagaggagcctcacggtcacgtccaacaacaccactgcaccagggaaatggatatatatttttggactggtgtttttcacaaagtatttttcaatcagagttttcagaacctgacattgttaaagatactgcttgtcccggagttgtgtattttgtaaatgttcaagggaactgtttggaaacttctttccaccattca

SEQ ID NO: 22812 - DNA, 3473 bp, Homo Sapiens
aagagcagcggcgaggcggcggtggtggctgagtccgtggtggcagaggcgaaggcgacagctctaggggttggcaccggccccgagaggaggatgcgggtccggatagggctgacgctgctgctgtgtgcggtgctgctgagcttggcctcggcgtcctcggatgaagaaggcagccaggatgaatccttagattccaagactactttgacatcagatgagtcagtaaaggaccacactactgcaggcagagtagttgctggtcaaatatttcttgattcagaagaatctgaattagaatcctctattcaagaagaggaagacagcctcaagagccaagagggggagagtgtcacagaagatatcagctttctagagtctccaaatccagaaaacaaggactatgaagagccaaagaaagtacggaaaccagctttgaccgccattgaaggcacagcacatggggagccctgccacttcccttttcttttcctagataaggagtatgatgaatgtacatcagatgggagggaagatggcagactgtggtgtgctacaacctatgactacaaagcagatgaaaagtggggcttttgtgaaactgaagaagaggctgctaagagacggcagatgcaggaagcagaaatggtgtatcaaactggaatgaaaatccttaatggaagcaataagaaaagccaaaaaagagaagcatatcggtatctccaaaaggcagcaagcatgaaccataccaaagccctggagagagtgtcatatgctcttttatttggtgattacttgccacagaatatccaggcagcgagagagatgtttgagaagctgactgaggaaggctctcccaagggacagactgctcttggctttctgtatgcctctggacttggtgttaattcaagtcaggcaaaggctcttgtatattatacatttggagctcttgggggcaatctaatagcccacatggttttgggttacagatactgggctggcatcggcgtcctccagagttgtgaatctgccctgactcactatcgtcttgttgccaatcatgttgctagtgatatctcgctaacaggaggctcagtagtacagagaatacggctgcctgatgaagtggaaaatccaggaatgaacagtggaatgctagaagaagatttgattcaatattaccagttcctagctgaaaaaggtgatgtacaagcacaggttggtcttggacaactgcacctgcacggagggcgtggagtagaacagaatcatcagagagcatttgactacttcaatttagcagcaaatgctggcaattcacatgccatggcctttttgggaaagatgtattcggaaggaagtgacattgtacctcagagtaatgagacagctctccactactttaagaaagctgctgacatgggcaacccagttggacagagtgggcttggaatggcctacctctatgggagaggagttcaagttaattatgatctagcccttaagtatttccagaaagctgctgaacaaggctgggtggatgggcagctacagcttggttccatgtactataatggcattggagtcaagagagattataaacaggccttgaagtattttaatttagcttctcagggaggccatatcttggctttctataacctagctcagatgcatgccagtggcaccggcgtgatgcgatcatgtcacactgcagtggagttgtttaagaatgtatgtgaacgaggccgttggtctgaaaggcttatgactgcctataacagctataaagatggcgattacaatgctgcagtgatccagtacctcctcctggctgaacagggctatgaagtggcacaaagcaatgcagcctttattcttgatcagagagaagcaagcattgtaggtgagaatgaaacttatcccagagctttgctacattggaacagggccgcctctcaaggctatactgtggctagaattaagctcggagactaccatttctatgggtttggcaccgatgtagattatgaaactgcatttattcattaccgtctggcttctgagcagcaacacagtgcacaagctatgtttaatctgggatatatgcatgagaaaggactgggcattaaacaggatattcaccttgcgaaacgtttttatgacatggcagctgaagccagcccagatgcacaagttccagtcttcctagccctctgcaaattgggcgtcgtctatttcttgcagtacatacgggaaacaaacattcgagatatgttcacccaacttgatatggaccagcttttgggacctgagtgggacctttacctcatgaccatcattgcgctgctgttgggaacagtcatagcttacaggcaaaggcagcaccaagacatgcctgcacccaggcctccagggccacggccagctccaccccagcaggaggggccaccagagcagcagccaccacagtaataggcactgggtccagccttgatcagtgacagcgaaggaagttatctgctgggaacacttgcatttgatttaggaccttggatcagtggtcacctcccagaagaggcacggcacaaggaagcattgaattcctaaagctgcttagaatctgatgcctttattttcagggataagtaactcttacctaaactgagctgaatgtttgtttcagtgccatatggaataacaactttcagtggcttttttttttcttttctggaaacatatgtgagacactcagagtaatgtctactgtatccagctatctttcttggatccttttggtcattatttcagtgtgcataagttcttaatgtcaaccatctttaaggtattgtgcatcgacactaaaaactgatcagtgtaaaaaggaaaacccagttgcaagtttaaacgtgttcgaaagtctgaaaatagaacttgccttttaagttaaaaaaaaaaaaagctatcttgaaaatgttttggaactgcgataactgagaaactcttaccagtccacatgcaattagacatattcagcatatttgttattttaaaagggagggttgggaggtttcttattggtgattgtcacacggtataccatactcctctccttcaaagaatgaaaggccttgttaaggagttttttgtgagctttacttctttggaatggaatatacttatgcaaaaccttgtgaactgactccttgcactaacgcgagtttgccccacctactctgtaatttgcttgtttgttttgaatatacagagccttgatccagaagccagaggatggactaagtgggagaaattagaaaacaaaacgaactctggttggggtactacgatcacagacacagacatacttttcctaaagttgaagcatttgttcccaggatttattttactttgcatttccttttgcacaaagaacacatcaccatttccttttgcacaaagaacacatcacc

SEQ ID NO: 22813 - DNA, 1109 bp, Homo Sapiens
tgaggagacactgggacaggctggcctagggtcctgatgcaacggagggggcgctaggggcatctttcgagcacgagggtggccagcagccgccagctgacctcaccgtccaggcggacactctccaccgcccctcagccaggctgggtggggcccacagggcctgccccaagcggcggccacacagggtgttgtggagatgggccagaggggcctgggcttggcggtgccaggctcgtgagaagcaggaaactcaaggccagccctgccacatcacggggcacccactgggcgtgaggcagagcccgcggctgtggggcagctccagccctgcccacaggccaccctcgcccgcacaggcagcactgaggccgggaccctgtggcgcccgatccgccactgcagaagagaccctctgtggacacccacactctgcagggactggcccccaactcaccccgtgctggctggtggggtccatttccccgcagcgggtatggaggatgcgtcgaggtccctgtctctgtcaatgtcatgggaaccaaaagtcactgagccgtcctccccccacctccgagcacagggcctggagggcaggggctccccgaaggctgggggttggagaagggtgaggggcttcccccagggatccccccacctggcctgctcacggggccttggagcatgagaccagtgaccccgagttttgcccatatcaggacagtggctccttctcactcccctttctcaggccaggagggccgagggccacacgggtgccacagcccaggtcggagtggcccagccggcaggcttgttcttcagcatccgacgggaacatctccaacagaagcaaaacggaaagtgcctcccggacccccagagggccacccaacctcaccagtcaccagccccagaccacccacagcccctcccagacaccccgcctcatctggaaatagttccgtttgtttctctaaaaagacttgtaggtgggaaaaaaaatcttttgttctcatggaattggcctattggcaagatcgcatgtttttttaataaacgttgtattttagaataatcttaaaaaaaaaaaaaaaaaaaaaaaaaaa

SEQ ID NO: 22814 - DNA, 1773 bp, Homo Sapiens
ggtgctagtgatcttgggttatttagaagaaaaatccataaaactgatgggttaagaatggaggtgaagccagacatagtggctcatgcctgtaatcccagcgttttgggaggcttgaggccaggagtttcagaccagcctgggcaacacagtgagacctcatttctaaaaaaaaaaaaaagaaaaaaataagccagacgtggtggtacacacctgtagtcccagtcacttgaggggctgaggtgggaggatcacttgagcccaggagtttgaagctgcggtgagccgtgattacaccactgcactccaacctgggcgacagagcgagaccttgtctccaaaataaaataaaacaaaataaaagaactcagggaaaatagacacctggtttctatctggtggctattctttcatttctgcctacaaagcatacatatttgtaaatggcgtgtcacatgtcaaaacattttgagtctgtcggtcttactcctctccacattcccacatccctccaaagggagtgggatgaaatgcccttctgcattctctcctttctcccaccaactcaccctttaggccaacccattctcacttcttcaggaggatcaccaggcctcccacactccctgcttccacaacctccagccccctgggccctcctgccccatctgctgtggctcagatggggcttcctatgaatctcatctctgtggacgttcatcacttcccaagatgggggtatgacatgcccttcctttctactcctgtcagtaaaacgtgctggagggcacggggacctcatgccacagccaagacgtctgagtggtaggagactgaagaaacgtataggaaatgtgctcagagttagcacccctgagagaccagtggtcagagagcaagctcaaatgggacagtctgttaaacatggaggatttgtgctgggggaaaatgcttcttactcacatctgttttcttctttgtggagagaatgcactatcgtcactactggtattagtgatccactattgtcattccctctttctctgctccctcattctttccctcactggggaaagaagtgtgactgagctaattggtgaatttgggagcaataaacagggtgtattccctggggctccttcctctttcccgttactaagcaggctagatcaggaggcacaccaactctgcccctcacatccccagggctgtctgagactggacggccaaggtcagctgtgcccctcacgtccttggggctgtctaagactgggtggccaagttcagctctggttttgttgtctggaaacctactttcttgcagagatattagccacatctctaatatccgtgtattagttataaagacaatattttaacttcctatctgctttacccttttgtcttattcttcaacagatggagacgtcaggcaggaaagggaagggacagtttactgaatctctgcccacaacaactatcaacatatatcgaccttctttccctcccaaagccccattaaaatgacagcaaaagatatgtaaaaatgattgactataaaaacaaagagaacagaataggaaacgtaaggagaagagaagtaaacttgatccctgcccaaattgacataaacacaatttttcttctatgtgtaaacatattagaagtgagccagttccaggcacagtgaatgaaaaatagaccagcctacttctttgtactaagtagaatgtttattatgaaaacaaaaacaaaaacaaaaacaaaaaaaaa

SEQ ID NO: 22815 - DNA, 15964 bp, Homo Sapiens
agagccgagctgggagatggcggcggcagcggcggcgccgagagtgtgagcaccgcccgggagccgccggcccgggcgcagcgcgaccccgaccccgcccgcccgcctgcccgccatgggcaacgaggtcagcctggagggcggcgctggcgacgggccgctgccgcccggcggcgccggccccggcccgggccccggccccggccccggcgcaggaaagccgccttcagcaccggccggtggcggacagctccccgcggcgggagcagcgcggtcgaccgcggtaccaccggtccctggccccggccccggccccggtcccggccctggcccgggcagcacttcccggagactggaccccaaggaacccctgggtaaccagagagcagcttccccaactccgaagcaggcttctgctaccactcctggccatgagagcccccgagagacaagggcacagggaccagcaggccaggaggctgatggtccccgcaggacgctgcaggtagacagcaggacacagagatcagggcggtccccctcagtgtcaccggacagaggcagcacccccacatcaccctactccgtccctcagatcgccccccttcccagcagcacgctgtgtcccatatgcaagacttcggacctcacgtcgacccccagccagccaaacttcaacacctgcacccagtgtcacaacaaggtctgcaaccagtgtgggttcaaccccaaccctcatctcacccaggtgaaggagtggctctgtctgaactgtcagatgcagagggctctgggaatggacatgaccactgcacctcgctccaagagccagcagcagctgcactccccagccctgtctcctgcccactccccggccaaacagcccctggggaagccagaccaagagagatctcggggcccaggaggaccacagcctgggtcccgccaggctgagacagccagggccacctcagtgccggggcctgcccaagcagctgcccctccagaggtggggagggtgtctcctcagccccctcaacccaccaagccttccacagctgagcccaggccacctgcaggagaggccccggccaaaagtgccaccgcagtgcccgctgggcttggtgccactgagcagacccaggagggcctcactggtaagctcttcggccttggcgcgtcactgctaacccaggcgagcaccctcatgtctgtgcagcccgaggctgacacccagggccagcctgcccccagcaaggggacacctaagatcgtcttcaatgatgccagcaaggaggctggcccaaaacccttgggctcagggcccgggcctgggccagcacctggagccaaaactgagcctggggctagaatgggtcctggatctggacctggagccctgccgaaaactgggggaacaaccagtccaaagcatggcagagcagaacatcaggcagcatcgaaggctgctgccaagccaaagaccatgccgaaggaaagggccatctgcccactgtgccaagccgagctcaacgtgggcagcaagagcccagccaactataacacatgcaccacctgcaggctccaggtgtgcaacctgtgtggcttcaacccaacaccccacctggtggagaaaacagagtggctctgtctgaactgccaaaccaagcggctactggagggcagcctaggagagccgacccccctgccgccgcccacctcacagcagccccctgtaggggcccctcaccgtgcatctggaacatcccctctgaagcagaaagggccacaggggctgggccagccttcaggccccctgcctgccaaggccagccctctatccaccaaggccagccctctgcccagcaaggccagcccccaggccaagcccctcagggcttctgaacccagcaagaccccaagcagtgtccaggaaaagaagacccgagtccccactaaagctgagcccatgccgaagccacctccagagactaccccaacccctgcgactcctaaagtaaagagtggggtgaggagggctgaacctgccacccctgtcgtcaaggctgttccagaagcccccaagggtggggaggcggaggacctggtgggcaagccttactctcaggatgcgtctcggagcccacagagcctcagtgacacaggctattcctctgacggcatctctagctcccagagtgagatcacaggagtcgtgcagcaggaggtggaacagctggacagtgcaggggtgacagggccacatccacccagcccctccgagatccacaaggtggggagcagcatgcggcctttgctgcaggcccagggcctggccccaagtgagcggagcaagccactctccagcggtactggcgaggagcagaagcagcggccccactccttgtccatcacgcctgaggcctttgactctgatgaggagctggaggatatcctggaggaagacgaagactctgctgagtggaggcgccggagagagcagcaggacactgccgagtcctcagacgactttggcagccaattgaggcacgactatgtggaggacagcagtgagggtggcctgtcccctcttccaccccagcccccagcccgggcagcagaactgactgatgaggatttcatgcgacggcagattctcgagatgagcgccgaggaagacaacctggaggaggatgacactgccacctccgggcgtggcctggccaaacatggcacccagaaaggtggccccagacccaggcctgagcctagccaagaaccagcagcactgcccaagaggcgcctgccccacaatgccaccacgggctatgaggagctgctccctgagggaggctcagcagaggctaccgatggcagtgggaccctgcagggtgggctccgtcgcttcaagaccattgagctcaacagcacgggaagttatggtcatgagttggacctgggccaaggcccagaccccagtctggaccgggagcctgagctggagatggagagcctaacgggctcccctgaggaccgctcccgtggtgagcactcctctacattgcctgcctccacacccagctacacctcgggcacctctcccacctctctgtcctccctagaggaggacagtgacagcagccccagccgcaggcagcgtctagaagaagcaaagcagcagcgcaaggcccggcaccgctcccacgggcccctgctacccaccatcgaggactcctcagaggaggaggagctgcgggaggaagaggagctgcttcgtgagcaagagaagatgcgggaggtggagcagcagcgcatccgcagcacagcccgcaagacccggcgggacaaggaagaactgcgggcccagcggaggcgagagcgctccaagacaccacccagtaacttgtcacccatcgaggatgcctccccgacggaggagctgaggcaggcggccgagatggaggagctacaccgctcctcctgctctgagtactcaccctcaccctcccttgactctgaggctgaggccttggatggtggccctagccggctttacaagtcaggcagtgagtacaacctgcccaccttcatgtccctctactcaccaaccgagacaccctccggcagctccaccactcccagttccggacggccgctcaagagcgctgaggaggcttatgaggagatgatgcgcaaagctgagctgctccagaggcagcaaggccaggcagcaggggcccggggaccccatggcggcccctctcagcccacaggcccccggggcctgggctccttcgaatatcaagacactacagaccgtgagtatggccaggctgctcagcctgccgcagagggcacgccagccagcctgggagcagccgtgtacgaagaaatccttcagacatcacagagcatagtccgcatgcggcaggcctcctcacgagacctggcttttgctgaggacaaaaagaaggagaagcagtttctaaatgctgagagtgcatacatggacccaatgaagcaaaatggtggcccccttacccctggtaccagtcccacccagctcgctgcccctgtgtccttctctacccccacctcctcagacagcagcgggggccgagttattcccgatgtccgtgtcactcagcattttgcaaaggagactcaggaccccctcaagctgcacagctctcctgcctcccccagctcagcctccaaggagataggcatgcccttttcccagggccctgggaccccagccaccacagctgtggctccttgtccagctgggctgccacgaggatatatgactccagcctccccagcaggctccgagcgtagtccttcaccatcttccacagcccacagctatggacacagcccaaccactgcaaactatgggtcccaaactgaggatctaccccaggcccccagtggccttgctgcagctggacgagctgctagagagaagcccttgagtgcgagtgacggtgagggtggcactcctcagccttcccgggcatattcctactttgcaagctccagcccacctctctccccgtcttccccctcagagagtcccacattctcccctggcaagatgggcccaagggccacagcagagttctctacacagacgccaagtccagcccctgcctcagacatgccacggagccctggtgcccccactccatcacctatggtagcccagggtacacaaacaccacatcgacccagcacgcctcgcctggtgtggcaggagtcctctcaagaggctccctttatggtcatcacgctggcatctgacgcctccagccagaccaggatggtacatgccagtgcctccacctccccgctctgctcacctactgaaacccagcccaccacccatggctacagccagacaacacctccgagtgtgtctcagctgcccccagagccacctgggccacctggctttccacgggtgcccagtgctggtgcagatgggcccctggcactatatggctggggtgccctccctgctgagaacatctccctgtgccggatctcctctgtccctgggacgtctagggttgagccaggccccaggacccctggcactgcagtggtagacctccgtacagctgtcaagcccactcccatcatcctcactgaccagggcatggacctcacctctcttgctgtggaagcgaggaagtatggtcttgccctggatccaatcccaggacggcagtcgaccgccgtgcagcccttggttatcaacctcaatgcccaggagcataccttccttgctactgccaccaccgtgagcatcaccatggcctcgtctgtgttcatggctcaacaaaagcagcctgtggtctatggagacccctaccagagccgccttgactttggccagggtgggggtagccctgtgtgcctggcccaggtcaaacaagtagagcaggctgtccagacagccccataccgaagtgggccccggggaagacccagggaggccaagtttgccagatataacctacccaaccaagtagctcctctggccagaagagacgttttgatcactcagatgggcaccgcccagagcattggcctcaagccaggcccagtgccagagccaggtgccgagccccaccgggccacccctgcagagctgcggtcacatgctctgccaggtgccaggaagccacacacagtggtggtgcagatgggagagggcacagcaggcactgtgaccacactgctcccagaggagcctgcgggtgccctggaccttaccgggatgaggcctgagagccagctggcatgctgtgacatggtctacaagctcccctttggcagcagctgcactggcaccttccacccggcccccagtgtgcctgagaagagcatggcagatgctgccccacctggccaaagcagcagccccttctatggtccccgggaccctgagcctcctgagcccccaacctaccgggcacagggggtggtggggcctgggccccatgaggagcagaggccctacccacaaggcctgcctggtaggctgtactcctccatgtctgacaccaatttggctgaggctggcctcaactaccatgcccagaggatcgggcagctcttccagggtcctggacgagactcggctatggacctcagctcactgaagcactcctacagcctgggctttgcggatggacgctacctagggcagggcttgcagtatggctcagtcacggacctgcgtcatcctacagaccttttggctcacccgcttcccatgcggcgctatagctcagtgtcgaacatctactcagaccacaggtacggcccacggggagatgcagttggcttccaggaggccagcctggcccagtacagtgccaccacagcccgtgaaatcagtcgcatgtgcgctgccctcaactccatggaccagtatggtgggcggcatggcagtggtggtggtggccctgaccttgtgcagtaccagccccagcacgggcccgggctcagtgctccacagagtctggttcccctcagacctggactccttggtaaccccacctttccagagggccacccaagtcctgggaacttggcccagtatgggcctgcagcaggccaaggaacagcagtcagacagctgctgccgtccacagccactgtacgtgcagctgatggcatgatctactcgactatcaataccccaattgctgcaacactgcccatcaccacccagcctgcctcagtcctgcggcccatggtgcgtggtggcatgtacaggccttacgcatctggtggaatcacagccgtgccactcaccagtctgacacgtgtgcccatgattgccccccgggtacctcttggacccacagggctgtaccgctatcctgcaccaagtagatttcccattgcttccagtgttccacctgcagaagggcctgtctatctggggaaacctgctgctgccaaggcccctggggctgggggcccttcaaggccagagatgccagtaggggctgcacgggaagagcctcttcccacaaccacccctgctgccatcaaggaggctgcaggagccccagctcctgccccactagctggccagaagccaccagcagatgctgctcctgggggtggcagtggggccctcagccggccagggttcgagaaagaggaagcatcacaggaggagaggcagcggaagcaacaggagcagctgctccagctagagcgggagcgggtggagttggagaagctgcgacaacttcggctgcaagaggagctagagcgggaacgtgtggagctgcagaggcaccgtgaggaggagcagctgctggtgcagcgggagttgcaggagctgcagaccatcaagcaccatgtgctgcagcagcagcaagaggaacgccaggctcaatttgcactgcagcgggaacagctagcgcagcagcgtctgcagctggagcagatccagcagctgcagcagcagctgcagcagcagctagaggagcagaagcagcggcagaaggctccctttcctgcagcctgtgaggcacctggccgagggcctcccctagcggctgctgagttggcccagaatggccagtattggcccccccttacacatgcagccttcattgccatggcagggcctgaaggacttgggcagcctcgtgagcctgtgctgcaccggggtctccccagctctgcctcagacatgtcactgcaaacggaggagcagtgggaggccagccgtagtggcatcaagaagcggcactccatgccacgcctgcgggatgcctgtgagctagagtctgggactgagccctgtgtggtcaggaggattgccgacagcagcgtgcagacagacgatgaggatggggagagccgctacctcttgagtcggcgacgccgggcacggcggagtgctgactgcagtgtgcagacggacgacgaagacagtgctgagtgggagcagccagtgcgccgccgcaggtctcgtcttccccgccactcagactcaggctctgacagcaagcacgatgccactgcctcatcatccagtgctgctgccactgtgagggccatgagcagcgtgggcatccagaccatcagtgactgctccgtgcagacggagcctgaccagctgcccagggtctctccagccatccacatcacagctgccaccgatcccaaggtggagatcgtcaggtacatatcggcgccagagaagactgggcgtggggagagcctggcctgccagacggagccagatgggcaggcccagggtgtagccgggccgcagcttgtagggccaactgccatcagcccctacctgcctggcatccagatcgtcaccccagggcctctgggcagatttgaaaaaaagaagccagatcccctggagattgggtaccaggcccacctgcctccggagtctctctcacagcttgtgagccgccagcctcccaagtcccctcaggtcctctactcaccagtctcacccctgtcccctcaccggctcctggacacctcctttgcttccagtgagaggctgaacaaagctcacgtgagtccccagaagcacttcacggctgacagcgctctccgccagcagacgctgcctcgccccatgaagaccctgcagcggtccctgtctgaccctaagcccctcagccccaccgccgaagagtctgccaaagagagattctccctctaccagcaccaggggggactgggtagccaggtgtcggcgttgccacccaacagcctggtccgcaaggtgaagcggacactgcccagcccccctccagaggaggctcaccttcccctggctggccaggcctccccacagctgtatgcagccagcctgctgcagcgagggctgacggggcccaccactgtccctgctaccaaggccagcctgctccgggagctggaccgggacctgcggctggtggagcatgagtccaccaaactgcgcaagaagcaggcagagctggatgaggaggagaaggagattgacgccaagctcaagtacctggagttgggtatcacacaacgcaaagagtctttggccaaagaccggggtggccgtgactacccacccttgcgtggtcttggcgagcatcgtgactacctatcggacagtgagctcaaccagctgcggctccagggctgcaccactcccgctggccagtttgtggacttccctgccactgccgctgctcctgccaccccctctggtcccactgccttccagcagccccgcttccagcctccagccccacagtattctgcaggcagtggtgggccaactcagaacggattcccagcccaccaggcccccacctaccctggccccagcacgtacccagctcctgcctttcctcctggtgccagttacccagctgagcctggcctgccaaaccagcaggctttccgccccacaggccactatgcaggccaaacacccatgccaaccacacagagcaccctttttccagtccccgctgatagccgtgccccactgcagaagccacgccagacatcgctagccgacttggagcagaaggtgcccaccaactatgaggtgatcgccagccccgttgtgcccatgtcttcagccccatctgaaaccagctacagtggcccagcagtgagcagcggctatgagcagggcaaggtccctgaggtgccccgggctggtgaccgtggcagtgtgagccagagcccagcccccacctacccctctgactcacactataccagtctggagcagaacgttcctcgaaactacgtaatgattgatgacatcagtgaactgaccaaggacagcacctctactgctcctgatagccaacggctggagcccctggggccaggcagcagtgggcgtccagggaaggagcctggagaaccaggtgtccttgacgggcccacactgccctgctgctatgccagaggagaagaggaatctgaggaggactcatacgatccccgcgggaagggtggccacctccggagcatggagagcaatggtcgaccagccagtacccactactatggtgacagtgactacaggcatggggctcgagtagagaagtatggtccagggcccatggggcccaagcatccctccaagagcctggctccagctgccatctcctcaaagcgcagcaagcaccggaagcagggcatggagcaaaagatatccaagttctcgcctattgaagaggccaaagacgtagagtcagacctggcgtcctaccccccacctgcagtcagcagcagcctggtctctcggggcaggaagttccaggatgaaatcacctatgggctcaagaagaacgtgtatgagcagcaaaaatactatgggatgtccagccgggacgcagtggaggacgaccgcatttatggcgggagcagccggtcccgggcaccttctgcatacagtggggagaagctgtccagccacgacttcagtggctggggcaaggggtacgaaagggaacgggaggctgtggagcgacttcaaaaagcgggccccaagccctcatccctaagtatggcccacagccgggtacgaccccccatgcggagccaggcctctgaagaggagagccccgtcagtcctttggggaggccccgccctgccggagggcccctccctcccggcggggatacctgcccacagttctgctccagccactccatgcctgatgtccaggaacatgtcaaggacggacctcgggcccacgcatataagcgtgaggagggctacatcctggatgattcccattgcgtggtttccgacagcgaagcgtatcacctgggccaggaggagacggactggtttgataagccccgggatgcccgctctgaccggttcaggcaccacgggggccatgcagtttcctcctcctcccagaagcgaggccctgccaggcacagctaccatgactacgatgaaccccctgaggagggcctgtggcctcatgatgagggtggcccaggccgccatgcctcagccaaggaacaccggcacggtgaccacgggcggcactcaggccgccacactggtgaggagccgggacggcgtgctgccaaaccacacgctcgggacctgggtcgccatgaggcccggccccactctcagcccagctctgctccagctatgccgaagaagggtcagcctgggtatcccagctctgctgagtactcacagccatcccgtgcttcatccgcataccatcatgcctctgacagcaagaagggctcccggcaagcccactccgggcccgctgcactgcagtcaaaggcagaaccccaggcgcagccgcagctgcaaggtcggcaggcagctccaggaccacagcagtcacagtcaccatcatccaggcaaataccctctggggcagcatcacgccagccacagacacagcagcagcagcaaggtcttgggctgcagcccccacagcaggctctgacacaggctcggctgcagcaacagagccagccaaccacccggggctcagcccctgctgccagccagcctgcagggaagcctcagccaggccccagcacagccacaggtcctcaaccagcaggaccgccacgggcagaacagacaaatggctctaaagggacagccaaagcaccgcaacaggggagggctcctcaggcccagccaacaccaggacctggacctgcaggtgtgaaggctggagccaggcctggaggaaccccaggggctcccgccggccagccaggtgccgatggggagagcgtgttctccaagatcctccctggcggggcagccgagcaagctggcaaactgacggaagctgtctctgcttttggcaaaaaattttcctcactctggtgaccatgcccagcatggctcttgaagaaatgaagagaggtatcattgctgtggaaaaatctctggagtcagaggcctgggcgcagctctggactctgcgtataacacatctacaatctggcaaacccttggcccaaagactcaccaggtgggacgtggcaggcaggcctcagttgaggacgtgatgttttctcacagcagctgcctgggtgaagcatctgctggacaagtcggaccactggccaggggacctttgattgtctttccagagatgctgctctctgcagggcaccaccttcaaggcacagcccttgttgggagggagaaccctctccagaaaccctgccaccatggtgtcttgccgtacttcccacagccgcctttttgcggcctggccggccaggcttcccgtgcgttatacacagagtttgggcacacactgccctccctccgagatgccagaagtttttccacagccttggagaggggctttgactgagggctgggggccctgggctccgtttccttcacattccagctggcccggatccctctgtggcacagggccctgcccgtcacatgccctctgggtgacatcggagcagacctccatgtggccaggggttgggagaactttacaaacattaggacctaacactgtctcatcgctgaaataagaggccatagcaccgaaaagcagcgtgggcgccggctgaggcttctcccagcccgtgggtggcagcgtgctagcacactgccaccatctcaaagccatccccctagccatcgtgagcatcccagcggcaccgccattgtctcaaccagccggctcctcgtctgtacacctggggatttcttttgatttcaagaacagccttaatcattccagtttgatttacgtgtatacctcataaacatttttcttttgtttctctctccccctttctctcttctcttggctcactcccttgcctctccccctccaccaccaccttgtgactgatggtttggtttcctctctgctctgcccctgctcagcacagggagaatgttgacttagaagcaatagggggcagcaggccaccaagagcacaaccccagggcgaggtctggggaggcctcccagcccgcctctgtttactgtgcaattccagtcgttcttaagccatcaccagtgggtgtactcagagcagaggggccaggacttctgccagccaagggaaaggcccagagccctgtgcgggggaatgtggcactgtctatccatccggtggactgggcagcattcctccccagggctcttcccttgggggcctcctttcatctggggcacagccacaagtctcatctctaacgttctatgcaatgaaatataaaccctcaatgacaactgttaatatttaataaattccatgttatgtataaggagttaattgcaaacatgcaattgagaaactggatagatacactcataaaacccccacccctccccaccccacccctgctcccattgtgtgtgtgaaattctcagtctgtggcatgtttgacctgtggcaggactcgctgctgccaggtgagtcaccgcctgtcctgcagtggagcatgcacagctcgcagcctctttgcacgatttcatccattttaaatgcttgaccctcttgcttggagttctttttgcctcagaacctctccttcaggagcacttctagctgacttctgcacaagctagtgaggacctgccagaattgttgcctgagcgtgccaggctgcagggcaggcagtaaaaggcccccacataccctgcagttttctctgtccaggatagcaggtaaaaaggaatccccagagcagacgcaatggtaggagcctgcacaggatgtgtgtgtatggacattctgaaggtttgctgtaggatatctgtctgtctgtcattttcccttcctaccccaaccctgagccagaggcatctgacagccctttcccagagggcaccacgcaagggcagagctgggcggcatccacagccagagaggcagaggcaagagcagagccaggctgtgcccgagggaccccagctcttgactgcacctgtttcatgcctctcctctgtggctaggaggctcaaaggactgtgagccgggagatctgggctggagctagggggtcaatggatgctcaggaagagctgggcctttggcacttgtggtgagaacagttgacagtggtcatctggaactgttcatataaacagtggcttcaagctaagtttcttgtgaagtttctcaatagcaaatcttacagaaggtcctgtgtgaccctctctgcatctgtccccaggacctatgctccctgctcacccccttctccaaagcccaagcgtcccgctgctcatcagcttttttaccattgagccaggagtgcggcaggcagtacctgcctgacccttcaaggcctgaccttcgtccagagtgctctggtttgcaccatgcatttctcaggggtccgcatttctcatgcttttctataagatctacacaccccttcagagagggctcctcgctcacctctggtagctatggatgggacaggaagctgccaacctttgtgttggacttaacacccttgcctttctgggacttggcctcaccccacccatggaatacctgcctcatcccaaagatcaggtatgggctgaatgcagccatctgagcaagggctgagggaagccatcatctaacacctctggccacccaggaccaggtctgtgtggggatgtgccttggagaccaaggcaatagtcctttccactacaggccaggggatgggacaagaagtagggaacaggcagggaaatgttaggaggtcagcctccagcaggcctagtctcaggctctaaagtactgacttttcagcaaatttcctttctggccaagccctctgagtttgaaattctgacatctgccactcctcatcccccactgtacccacaggatacatcatcgcccctctgtgaaggtggctggagcaggcctctggtccatggactgtccttcctggcccttgcatggatgcagttgtgactctggggacaatgcagccagaagctgagggaccagcacttggtgccttggaaagtagagagcaacagacacatctccaaatgggcaaggagtctctagcatgcagcccaggccttctccatacccctctccccagcatcatgagcaagggcattgcctcctctctctgctcacttcagggcccagtgcactcacttcacagtgacagccctcccctacaatccttgggcagagcatgtggtctgagggcccacagtgaaagaacagcagtggtggcaactatgccttgccttctggagcctgtagggagttttccaggcaggtcctttgccaggacagcatggtcctgccctgttgtcccgtctgctctcctcttacccacccccatgctgtaaatacttgtcatcatggactccaacagggttagagggacaggcctaatcaactgaaactcctcggagatgccatctctgtctccctgggtgccagcagccctgctgccatgttcactggggtggcactggagagccatggcagtcgtgagatattgtatgtgtatgcacatgatcatgtgtgtatgtgcgtgcgtgcgtgtgtgtgtgtgtgtgtgtgtttctgcctcattcagtttctggggtcaaatcagctccttctctccaagtgcactaccctggagagtggtggccactcaataccttttcctctagctttcatgtcttgtttttgctttccccttcctcctccctctctccctttctttccttctctcctcctttatttgaggggggaagagtgctgtacaaagtcaaacaaacaagtttacagttgtaagtgcaatgacccgagtcctccacatgaccttgtgattgtgtgctgtccttctgtgctctgtgagaactcgtggtacttcagtgtccctccccctgtattgtgacaaggtaattctgtggtatcagaataaaaggacttgatataaacaaaaaaaaaaaaa

SEQ ID NO: 22816 - DNA, 6588 bp, Homo Sapiens
ctggtctcgaactcgttgcctcaagtgattcgccttccttggtctcccaaagtgctgggtttacaagtgtgagctaccatgcccggccggatgtttttcaatgaaagttttatggctttcacttttttaaaggcttctacttaaagaatctgtcttagtgaagccttcctttattatgccatttaaaaactacagaaccacccaccacccctttctggtgccttatttttgtatacaactcttatcaccaggtaatatagaatgcattttaaactttttgtttattttctgaattccccagctagaatgtgccatgagagcagatacatttctctctcttcttcattgttattttttcagttcctggtaacagctcagattgcatgtttaataaatacttgccttacgaatgaatgaattcatttctgtcttttcccatctccttgtgtagtgcccggaaggcagtggatgaggaagaggaagcagttgaagaacgtcgcaatatgcgaactatctgggtgactggcagaaaaggtttaactgaaagggaagcagcagcccttatagtggaagaagccagaatgattctgcagcaggacttagttgaaatgggagtgcaatggaatccatgtgccctgttacattctagtacatgctcattgactcatagtgagtccgaagtaaaggaacacacatttatatcccaaactaagagttcttataaaaaattaacatcaaagaacaaaagtaacacaatatttagtgattcttatattaagcattcaccaaatatagtgcaagacttaaataaaagtagagagcatacaagttcctttaattgtaatttccagaatgggaatcaagaacatcagacatgttccattttcagagcaagaaaacgggcctctttagatataaataaagagaagccaggagcctctcagaatgaggggaaaacaagtgataagaaagttgttcagactttttcacagaaaacaaaaaaggcacctttgaatttcaattcagaaaagatgagcagaagttttcgatcttggaaacgtagaaagcatctaaagcgatctagggacagcagccccctgaaagactctggagcgtgtagaatccatttacaaggacagactctgtctaatcctagtctttgtgaagacccgtttaccttagatgagaagaaaacggaatttagaaattcagggccatttgctaaaaatgtatctttgagtggtaaggaaaaagataataaaacatcattcccattacaaataaagcaaaattgttcatggaacataacactaactaatgataattttgtggagcatattgtcacaggatctcagagtaaaaatgtgacttgtcaggccactagtgtggttagtgaaaagggcagaggagtagctgttgaggcagaaaaaataaatgaagtgctgatacaaaatggttcaaaaaaccagaatgtttatatgaaacaccatgacatccatccaattaaccagtacctgcgaaagcaatctcatgaacagacaagcactattaccaaacagaaaaatataatagagagacaaatgccctgtgaagcagtcagtagttacataaatagagactcaaatgttactatcaattgtgaaaggataaagcttaatacagaggaaaataaaccaagtcattttcaggcattaggagatgatataagcagaactgtgatacccagtgaagtacttccatcagctggagcatttagcaaatcagaaggccagcatgagaattttctaaatatttctagactacaagaaaaaacaggtacttatacaacaaacaaaactaaaaataatcatgtttctgacttaggtttagtcctctgtgattttgaagatagtttctatctggatactcagtcagagaaaataatacaacagatggcaactgaaaatgccaaactaggagcaaaggacaccaacctggcagcagggataatgcagaagagcttagtccaacagaactcaatgaactcttttcagaaggagtgtcacattccttttcctgctgaacagcaccctctaggagcgactaagatagatcatttggaccttaagactgtaggtactatgaaacaaagcagtgattcacatggggttgatatcctgactccagaaagcccgattttccattctccaatactattggaggaaaatggtctttttttaaaaaagaatgaagtttctgttactgattcacaattaaatagttttcttcaaggttatcaaacacaagaaactgtgaaaccagttatacttctgattcctcaaaagagaactcccactggtgtagaaggagaatgtcttccagttcctgaaacaagtttgaatatgagtgatagtttactatttgatagcttcagtgatgactatctagtaaaagaacaattacctgatatgcaaatgaaagaaccccttccttcagaagtaacatcaaaccattttagtgattctctgtgtctacaagaagacctaattaaaaaatcaaatgtaaatgagaatcaagatacccaccagcagttgacttgttccaatgatgaatctattatattttcagaaatggattctgttcagatggttgaagctttggacaatgtggatatatttcctgtccaagagaagaatcatactgtagtatctcctagagcattagaactaagtgatccagtacttgatgagcaccaccaaggtgatcaagatggaggagatcaagatgaaagggctgaaaaatcaaaattaactgggaccaggcaaaatcattcattcatatggtcaggggcatcatttgatctaagtccaggactgcaaaggattttagataaagtatccagtcctctagaaaatgaaaagctaaaatcaatgactataaacttttccagtttgaatagaaaaaatacagagttaaatgaagaacaagaagttatttcaaacttggagacaaaacaagtgcagggaatttcattttcttctaataatgaagtaaaaagcaagattgagatgctagaaaacaatgccaatcatgatgaaacctcatccctcttacctcgtaaagaaagtaatatagttgatgataatggtctcattcctcctacacccattccaacatctgcttctaagctgacatttccagggattcttgaaacacctgtaaacccttggaaaactaataatgttttacaacctggtgaaagttatttatttggctcaccttcagatattaaaaaccacgatttaagtccagggagtagaaatgggttcaaagacaacagccctattagtgacacaagcttttcacttcagttatcacaggatggattacagttaactccagcctcaagcagttcagaaagtttgtccataattgatgtagcaagtgaccaaaatcttttccaaacattcattaaggagtggcggtgcaaaaagcgattttccatctcactggcttgtgaaaagattagaagtttgacatcttctaaaactgctactattggcagtaggtttaagcaagctagctcacctcaggaaattcctattagagatgatggatttcccattaaaggttgtgatgacaccttggtggttggactggcagtatgctggggtggaagggatgcctattatttttcactgcagaaggaacaaaagcattctgaaattagtgccagtttggttccaccttctttagatccaagcctgactttgaaagacaggatgtggtaccttcaatcttgcttgcgaaaggaatctgataaagaatgttctgttgtcatctatgacttcatccagagctataaaattcttcttctttcttgtggcatctccttggagcaaagttatgaagatcctaaggtggcatgctggttactagatccagattctcaggagccgactcttcatagcatagttaccagttttcttcctcatgagcttccactcctagaagggatggagaccagccaagggattcaaagcctggggctaaatgctggcagtgagcattctgggcgatacagagcatctgtggagtccattctcatcttcaactctatgaatcagctcaactctttgttgcagaaggaaaaccttcaagatgttttccgtaaggtggaaatgccctctcagtactgcttggccttgctagaactaaatggaattggctttagtactgcagaatgtgaaagtcagaaacatataatgcaagccaagctggatgcaattgagacccaggcctatcaactagctggccacagtttttctttcaccagttcagatgacatcgctgaggttttatttttggaattgaagttgcccccaaatagagagatgaaaaaccaaggcagcaagaaaactctgggttctaccagaagagggattgacaatggacgcaagctaaggctgggaagacagttcagcactagtaaggacgttttaaataaattaaaggcattacatcctttaccaggcttgatattagaatggagaagaatcactaatgctattaccaaagtggtctttccccttcagcgggaaaagtgtcttaatccttttcttggaatggaaagaatctatcctgtatcacagtcgcacactgctacaggacgaataacctttacagaaccaaatattcagaatgtgccaagagattttgaaatcaaaatgccaacactagtaggagaaagcccaccttctcaagctgtaggcaaaggcctacttcccatgggcagaggaaaatataagaagggtttcagcgtgaatcctagatgccaggcacagatggaggagagagctgcagacagaggaatgccattttcaattagcatgcgacatgcctttgtgcctttcccaggtggttcaatactggctgctgactactctcagcttgaactgaggatcttggctcatttatcccatgatcgtcgtctcattcaagtgttaaacactggagctgatgttttcaggagcattgcagcagagtggaagatgattgagccagagtctgttggggatgatctgaggcagcaggcaaaacagatttgctatgggatcatttatggaatgggagctaaatctttgggagagcagatgggcattaaagaaaatgatgctgcatgctatattgactccttcaaatccagatacacagggattaatcaattcatgacagagacagtgaagaattgtaaaagagacggatttgttcagaccattttgggaaggcgtagatatttgccaggaatcaaagacaacaacccttatcgtaaagctcacgctgagcgtcaagctatcaacacaatagtccaaggatcagcagctgatattgtcaaaatagccacagttaacattcagaagcaattagagaccttccactcaaccttcaaatcccatggtcatcgagagggtatgctccaaagtgaccgaacaggattgtcacgaaagagaaaactgcaagggatgttctgcccaatcagaggaggcttcttcatccttcaactccatgatgaactcctatatgaagtggtagaagaagatgttgttcaggtagctcagattgtcaagaatgaaatggaaagtgctgtaaaactgtctgtgaaattgaaagtgaaagtgaaaataggcgccagctggggagagctaaaggactttgatgtgtaactgtgctgttgatgaagtcctcccagggaagcctgtgcagatgcagtcacctggaaagaacagagattaccctttcacctacctcagcaaaacaaactttcaagtcttgatagacttagcctagtaattttatagtgagagtttcaaactatatatcagtgtctatagcatcaaaaacttctgggggcgtgggggaagtagaataccaagtataatagttacattcactttcaaagagcatctatgaatttgccttttgtaacttactgtggctttaaacatattcagaacagatgcttgaaatatgcacttagcactttggttccacatctgtctgggtaaaccatgaagaaaatgaagctgctgcctcaatcgacccagacagcagccataggcagataaagatttggtttcaccctggtggtggtaggcatcgtgtgtgactttttttcctctaatatcaattttacagtacggaaatagtattttaaaatagtattggctaataaattatgaattctataaagtagtaagacttggtatggttggagtgtaggaatgaatattcatgaaatgtttcttattgcttttccttccctaattcatacaatgaatgtatttggaatacttacatattataaaataaactatacctcttcaagaggtatcctgttctgtaagatcagatgtttttattgcaggtcaatataatactgccagagacagaaaatacccccttatcagtcccttagtgcctctttctgtttgtggcatggtgagaaaacccatgctgaaaagattgtactttgtgatcccaatcagagggatggagctaatctttttgctgttgaaataaaatgaatttatgagaaaaaaaaaaaaaaaa

SEQ ID NO: 22817 - DNA, 1243 bp, Homo Sapiens
taaaaagcaaaagaattcgcggccgcgtcgacacgggcttccccgaaaaccttccccgcttctggatatgaaattcaagctgcttgctgagtcctattgccggctgctgggagccaggagagccctgaggagtagtcactcagtagcagctgacgcgtgggtccaccatgaactggagtatctttgagggactcctgagtggggtcaacaagtactccacagcctttgggcgcatctggctgtctctggtcttcatcttccgcgtgctggtgtacctggtgacggccgagcgtgtgtggagtgatgaccacaaggacttcgactgcaatactcgccagcccggctgctccaacgtctgctttgatgagttcttccctgtgtcccatgtgcgcctctgggccctgcagcttatcctggtgacatgcccctcactgctcgtggtcatgcacgtggcctaccgggaggttcaggagaagaggcaccgagaagcccatggggagaacagtgggcgcctctacctgaaccccggcaagaagcggggtgggctctggtggacatatgtctgcagcctagtgttcaaggcgagcgtggacatcgcctttctctatgtgttccactcattctaccccaaatatatcctccctcctgtggtcaagtgccacgcagatccatgtcccaatatagtggactgcttcatctccaagccctcagagaagaacattttcaccctcttcatggtggccacagctgccatctgcatcctgctcaacctcgtggagctcatctacctggtgagcaagagatgccacgagtgcctggcagcaaggaaagctcaagccatgtgcacaggtcatcacccccacggtaccacctcttcctgcaaacaagacgacctcctttcgggtgacctcatctttctgggctcagacagtcatcctcctctcttaccagaccgcccccgagaccatgtgaagaaaaccatcttgtgaggggctgcctggactggtctggcaggttgggcctggatggggaggctctagcatctctcataggtgcaacctgagagtgggggagctaagccatgaggtaggggcaggcaagagagaggattcagacgctctgggagccagttcctagtcctcaactccagccacctgccccagctcgacggcactgggccagttccccctctgctctgcagctcggtttccttttctagaatggaaatagtgagggccaatgc

SEQ ID NO: 22818 - DNA, 2553 bp, Homo Sapiens
acgcgtccgggaaacgttgcttctgaggggagcccaagatgaccggttctaacgagttcaagctgaaccagccacccgaggatggcatctcctccgtgaagttcagccccaacacctcccagttcctgcttgtctcctcctgggacacgtccgtgcgtctctacgatgtgccggccaactccatgcggctcaagtaccagcacaccggcgccgtcctggactgcgccttctacgatccaacgcatgcctggagtggaggactagatcatcaattgaaaatgcatgatttgaacactgatcaagaaaatcttgttgggacccatgatgcccctatcagatgtgttgaatactgtccagaagtgaatgtgatggtcactggaagttgggatcagacagttaaactgtgggatcccagaactccttgtaatgctgggaccttctctcagcctgaaaaggtatataccctctcagtgtctggagaccggctgattgtgggaacagcaggccgcagagtgttggtgtgggacttacggaacatgggttacgtgcagcagcgcagggagtccagcctgaaataccagactcgctgcatacgagcgtttccaaacaagcagggttatgtattaagctctattgaaggccgagtggcagttgagtatttggacccaagccctgaggtacagaagaagaagtatgccttcaaatgtcacagactaaaagaaaataatattgagcagatttacccagtcaatgccatttcttttcacaatatccacaatacatttgccacaggtggttctgatggctttgtaaatatttgggatccatttaacaaaaagcgactgtgccaattccatcggtaccccacgagcatcgcatcacttgccttcagtaatgatgggactacgcttgcaatagcgtcatcatatatgtatgaaatggatgacacagaacatcctgaagatggtatcttcattcgccaagtgacagatgcagaaacaaaacccaagtcaccatgtacttgacaagatttcatttacttaagtgccatgttgatgataataaaacaattcgtactccccaatggtggatttattactattaaagaaaccagggaaaatattaattttaatattataacaacctgaaaataatggaaaagaggtttttgaatttttttttttaaataaacaccttcttaagtgcatgagatggtttgatggtttgctgcattaaaggtatttgggcaaacaaaattggagggcaagtgactgcagttttgagaatcagttttgaccttgatgattttttgtttccactgtggaaataaatgtttgtaaataagtgtaataaaaatccctttgcattctttctggaccttaaatggtagaggaaaaggctcgtgagccatttgtttcttttgctggttatagttgctaattctaaagctgcttcagactgcttcatgaggaggttaatctacaattaaacaatatttcctcttggccgtccattattttctgaagcagatggttcatcatttcctgggctgttaaacaaagcgaggttaaggttagactcttgggaatcagctagttttcaatcttattagggtgcagaaggaaaactaataagaaaacctcctaatatcattttgtgactgtaaacaattatttattagcaaacaattgatcccagaagggcaaattgtttgagtcagtaatgagctgagaaaagacagagcatatctgtgtatttggaaaaataattgtaacgtaattgcagtgcatttagacaggcatctatttggacctgtttctatctctaaatgaatttttggaaacattaatgaggtttacatatttctctgacatttatatagttcttatgtccatttcagttgaccagccgctggtgattaaagttaaaaagaaaaaaattatagtgagaatgagattcatttcaatgtaatgcactaaagcagaacacgaacttagcttggcctattctaggtagttccaaatagtatttttgttgtcaaactttaaaatttatattaatttgcaaatgtatgtctctgagtaggacttggacctttcctgagatttattttatccgtgatgtattttttttaattcttttgatacagagaagggtcttttttttttttttaagtatttcagtgaaaacttggtgtaagtctgaacccatcttttgaaatgtattttcttcattgcaggtccacctaatcatcctgtgaaagtggtttctctatggaaagctttgtttgcttcctacaaatacatgcttattccttaagggatgtgttagagttactgtggatttctctgttttctgtcttacaagaaacttgtctatgtaccttaatactttgtttaggatgaggagtctttgtgtccctgtacagtagtctgacgtatttccccttctgtcccctagtaagcccagttgctgtatctgaacagtttgagctctttttgtaatatactctaaacctgttatttctgtgctaataaacgagatgcagaaccc

SEQ ID NO: 22819 - DNA, 2031 bp, Homo Sapiens
ggcacgagggcgagctgaggtggaggcaggctgcggcagacggcgacagtggcggcggcgccatggcagggcttgcaggatccctgctgccttggtgatcccgggctgacagccagagagcacagcggctcagctcctggagagtgagggttgaagaaagcggagggcagccgcctgcgcccgctggctcccattaggtcggttcctgcagcggtgcccggcagccttggtgaaggccctgcccggcagagatcatgtattgcctccagtggctgctgcccgtcctcctcatccccaagcccctcaaccccgccctgtggttcagccactccatgttcatgggcttctacctgctcagcttcctcctggaacggaagccttgcacaatttgtgccttggttttcctggcagccctgttccttatctgctatagctgctggggaaactgtttcctgtaccactgctccgattccccgcttccagaatcggcgcatgatcccggcgttgtgggcacctaacggcctgccctgttagctttccaaggaagcagaagacgggaggggaggcattgacataggtcataaagcattggagtttcaaatcccgcagcctcgcgggtgtcacattcctgacggcgcctttttggcctgtgatgttttatccttacaatgtgaataatggcactgaccggtgcttttattgtaaagtcctatagtcgtgggtggtcttgtggttgtgtgtgttctgtccccatctaggtcctggctggccgcatgaccacccctctcgcctcattactgtgaggagtctgggtccatcctggtcagctgccccaatgtgacctggggcagataaaatgccagtctcattgtcacctctgtgacccctccttgtcagggtctccttccttcccagaatgttactgactcctcagtccctcttctggtttccctttatttctcttctacccttttccttttttggggagtacctgtccaagacagggctcatttttgcacttatctcgaatttgaagagattgctgacgcccgagagcctcgctttttcatccttctttccttgttcagcaggctagacagaaacatgtcttgactgttagttgtccacaaatcttcagtattttctccacttcatttttaagaaaggaagcaacagatagatgttgctctttcacctgggtgtctgggctcaagctttcccgcccagcctcacttcctttgcccttcctcctgcctttctcaactgtcccaaggagggggcctcattgtgtctcccgtgcatgctctgcagcattgaagtatggtgtgttcacgtagttctagcagtccccagctgagtgagtgggagagtacctgtgtgtttcgtaacggccttgatccccttgatagatgtttggatattttttggtgtgccctgtgtgtgtgtgtgtgtacaaatacatgtgtatattccttttaaagaagctttatcgaacgtggtctgattttgaggtttagcaatagctagctatatatggtaggtgccgctacagtttttatttagcatggggattgcagagtgaccagcacactggactccgaggtggttcagacaagacagaggggagcagtggccatcatcctcccgccaggagcttcttcgttcctgcgcatatagactgtacgttatgaagaatacccaggaagactttgtgactgtcacttgctgctttttctgcgcttcagtaacaagtgttggcaaacgagactttctcctggcccctgcctgctggagatcagcatgcctgtcctttcagtctgatccatccatctctctcttgcctgaggggaaagagagatgggccaggcagagaacagaactggaggcagtccatctagggaatgggactgtgaggccatacttgtgaaacgtctggactgctattctagagcttttatttggtgtgttcgttgcacagctgtttgaaatgtttaataaagctttataaactttaaaaaaaaaaaaaaaaaa

SEQ ID NO: 22820 - DNA, 1080 bp, Homo Sapiens
gcggccgcggccggtgcatgtgcggctgctggatgcggaggcggcggcgacggcgcggatcggcaggatgttagggcagcagcagcagcaactgtactcgtcggctgcgctcctgaccggggagcggagccggctgctcacctgctacgtgcaggactaccttgagtgcgtggagtcgctgccccacgacatgcagaggaacgtgtctgtgctgcgagagctggacaacaaatatcaagaaacgttaaaggaaattgatgatgtctacgaaaaatataagaaagaagatgatttaaaccagaagaaacgtctacagcagcttctccagagagcactaattaatagtcaagaattgggagatgaaaaaatacagattgttacacaaatgctcgaattggtggaaaatcgggcaagacaaatggagttacactcacagtgtttccaagatcctgctgaaagtgaacgagcctcagataaagcaaagatggattccagccaaccagaaagatcttcaagaagaccccgcaggcagcggaccagtgaaagccgtgatttatgtcacatggcaaatgggattgaagactgtgatgatcagccacctaaagaaaagaaatccaagtcagcaaagaaaaagaaacgctccaaggccaagcaggaaagggaagcttcacctgttgagtttgcaatagatcctaatgaacctacatactgcttatgcaaccaagtgtcttatggggagatgataggatgtgacaatgaacagtgtccaattgaatggtttcacttttcatgtgtttcacttacctataaaccaaaggggaaatggtattgcccaaagtgcaggggagataatgagaaaacaatggacaaaagtactgaaaagacaaaaaaggatagaagatcgaggtagtaaaggccatccacattttaaagggttatttgtcttttatataattcgtttgctttcagaaaatgttttagggtaaatgcataagactatgcaataatttttaatcattagtattaatggtgtattaaaagttgttgtactttgaaaaaaaaaaaaaaaaaaaaaaaaaa

SEQ ID NO: 22821 - DNA, 1270 bp, Homo Sapiens
ggcacgaggctgcgccggaagtccctagccaggcctggcggtaaccttgggggcctcactgcagccgccgctgctgttggagtgggctttgcgagtctgaacgttggcggggctaggctcgttaactgccgagagcctccgggtttgcggtggaggacgctgaggcccgtggggggcaggcacccgggcgccgggcctcccagccgacatgtctctagtggcggaagccttcgtctcccagattgcagctgcagaaccttggcctgaaaatgctacattatatcagcaattgaaaggggagcaaattttactttctgacaatgcagcttctcttgcagtgcaggcctttttgcaaatgtgtaacttgcctatcaaagtagtttgtagggcaaatgcagaatatatgtctccatctggtaaagtaccttttattcatgtgggaaatcaagtagtatcagaacttggtccaatagtccaatttgttaaagccaagggccattctcttagtgatgggctggaggaagtccaaaaagcagaaatgaaagcttacatggaattagtcaacaatatgctgttgactgcagagctgtatcttcagtggtgtgatgaagctacagtaggggagatcactcatgctaggtatggatctccttacccttggcctctgaatcatattttggcctatcaaaaacagtgggaagtcaaacgtaagatgaaagctattggatggggaaagaagactctggaccaggtcttagaggatgtagaccagtgctgtcaagctctctctcaaagactgggaacacaaccgtatttcttcaataagcagcctactgaacttgacgcactggtatttggccatctatacaccattcttaccacacaattgacaaatgatgaactttctgagaaggtgaaaaactatagcaacctccttgctttctgtaggagaattgaacagcactattttgaagatcgtggtaaaggcaggctgtcatagagttatgtgttagtctcaggagtcttaacttttgaaatatgttttacttgaatgttacattagatattggtgtcagaattttaaaaccaaattactgctttttgaaacctcaaattatataatgtatcttatgtatgtgctttatattgttatttgtgtatacattaaaataattctgaattatttaatctgatatgttgtattctgtatcttgaaatttttgtttccttgaaacatgcatgcatttaaaaataaagcttaaacaactgt

SEQ ID NO: 22822 - DNA, 3935 bp, Homo Sapiens
tccctcgctcaccccatcctctctcccgccccttcctggattccctcacccgtctcgatcccctctccgccctttcccagagacccagagcccctgaccccccgcgccctccccggagccccccgcgcgtgccgcggccatggcggccgtgcgcggggcgcccctgctcagctgcctcctggcgttgctggccctgtgccctggagggcgcccgcagacggtgctgaccgacgacgagatcgaggagttcctcgagggcttcctgtcagagctagaacctgagccccgggaggacgacgtggaggccccgccgcctcccgagcccaccccgcgggtccgaaaagcccaggcggggggcaagccagggaagcggccagggacggccgcagaagtgcctccggaaaagaccaaagacaaagggaagaaaggcaagaaagacaaaggccccaaggtgcccaaggagtccttggaggggtcccccaggccgcccaagaaggggaaggagaagccacccaaggccaccaagaagcccaaggagaagccacctaaggccaccaagaagcccaaggaggagccacccaaggccaccaagaagcccaaagagaagccacccaaggccaccaagaagcccccgtcagggaagaggccccccattctggctccctcagaaaccctggagtggccactgcccccaccccccagccctggccccgaggagctaccccaggagggaggggcgcccctctcaaataactggcagaatccaggagaggagacccatgtggaggcacaggagcaccagcctgagccggaggaggagaccgagcaacccacactggactacaatgaccagatcgagagggaggactatgaggactttgagtacattcggcgccagaagcaacccaggccacccccaagcagaaggaggaggcccgagcgggtctggccagagccccctgaggagaaggccccggccccagccccggaggagaggattgagcctcctgtgaagcctctgctgcccccgctgccccctgactatggtgatggttacgtgatccccaactacgatgacatggactattactttgggcctcctccgccccagaagcccgatgctgagcgccagacggacgaagagaaggaggagctgaagaaacccaaaaaggaggacagcagccccaaggaggagaccgacaagtgggcagtggagaagggcaaggaccacaaagagccccgaaagggcgaggagttggaggaggagtggacgcctacggagaaagtcaagtgtccccccattgggatggagtcacaccgtattgaggacaaccagatccgagcctcctccatgctgcgccacggcctgggggcacagcgcggccggctcaacatgcagaccggtgccactgaggacgactactatgatggtgcgtggtgtgccgaggacgatgccaggacccagtggatagaggtggacaccaggaggactacccggttcacaggcgtcatcacccagggcagagactccagcatccatgacgattttgtgaccaccttcttcgtgggcttcagcaatgacagccagacatgggtgatgtacaccaacggctatgaggaaatgacctttcatgggaacgtggacaaggacacacccgtgctgagtgagctcccagagccggtggtggctcgtttcatccgcatctacccactcacctggaatggcagcctgtgcatgcgcctggaggtgctggggtgctctgtggcccctgtctacagctactacgcacagaatgaggtggtggccaccgatgacctggatttccggcaccacagctacaaggacatgcgccagctcatgaaggtggtgaacgaggagtgccccaccatcacccgcacttacagcctgggcaagagctcacgaggcctcaagatctatgccatggagatctcagacaaccctggggagcatgaactgggggagcccgagttccgctacactgctgggatccatggcaacgaggtgctgggccgagagctgttgctgctgctcatgcagtacctgtgccgagagtaccgcgatgggaacccacgtgtgcgcagcctggtgcaggacacacgcatccacctggtgccctcactgaaccctgatggctacgaggtggcagcgcagatgggctcagagtttgggaactgggcgctgggactgtggactgaggagggctttgacatctttgaagatttcccggatctcaactctgtgctctggggagctgaggagaggaaatgggtcccctaccgggtccccaacaataacttgcccatccctgaacgctacctttcgccagatgccacggtatccacggaggtccgggccatcattgcctggatggagaagaaccccttcgtgctgggagcaaatctgaacggcggcgagcggctagtatcctacccctacgatatggcccgcacgcctacccaggagcagctgctggccgcagccatggcagcagcccggggggaggatgaggacgaggtctccgaggcccaggagactccagaccacgccatcttccggtggcttgccatctccttcgcctccgcacacctcaccttgaccgagccctaccgcggaggctgccaagcccaggactacaccggcggcatgggcatcgtcaacggggccaagtggaacccccggaccgggactatcaatgacttcagttacctgcataccaactgcctggagctctccttctacctgggctgtgacaagttccctcatgagagtgagctgccccgcgagtgggagaacaacaaggaggcgctgctcaccttcatggagcaggtgcaccgcggcattaagggggtggtgacggacgagcaaggcatccccattgccaacgccaccatctctgtgagtggcattaatcacggcgtgaagacagccagtggtggtgattactggcgaatcttgaacccgggtgagtaccgcgtgacagcccacgcggagggctacaccccgagcgccaagacctgcaatgttgactatgacatcggggccactcagtgcaacttcatcctggctcgctccaactggaagcgcatccgggagatcatggccatgaacgggaaccggcctatcccacacatagacccatcgcgccctatgaccccccaacagcgacgcctgcagcagcgacgcctacaacaccgcctgcggcttcgggcacagatgcggctgcggcgcctcaacgccaccaccaccctaggcccccacactgtgcctcccacgctgccccctgcccctgccaccaccctgagcactaccatagagccctggggcctcataccgccaaccaccgctggctgggaggagtcggagactgagacctacacagaggtggtgacagagtttgggaccgaggtggagcccgagtttgggaccaaggtggagcccgagtttgagacccagttggagcctgagttcgagacccagctggaacccgagtttgaggaagaggaggaggaggagaaagaggaggagatagccactggccaggcattccccttcacaacagtagagacctacacagtgaactttggggacttctgagatcagcgtcctaccaagaccccagcccaactcaagctacagcagcagcacttcccaagcctgctgaccacagtcacatcacccatcagcacatggaaggcccctggtatggacactgaaaggaagggctggtcctgcccctttgagggggtgcaaacatgactgggacctaagagccagaggctgtgtagaggctcctgctccacctgccagtctcgtaagagatggggttgctgcagtgttggagtaggggcagagggagggagccaaggtcactccaataaaacaagctcatggcaaaaaaaaaaaaaaaaaaaaa

SEQ ID NO: 22823 - DNA, 3761 bp, Homo Sapiens
atgcctcacttcaccgtggtgccagtggacgggccgaggcgcggcgactatgacaacctcgaggggctcagttgggtggactacggggagcgcgccgagctggatgactcggacggacatggcaaccacagagagagcagcccttttctttcccccttggaggcttccagaggaattgactactatgacaggaacctggcactgtttgaggaagagctggacatccgcccaaaggtatcgtctcttctgggaaagctcgtcagctacaccaacctcacccagggcgccaaagagcatgaggaggccgagagtggggagggcacccgccggagggcagccgaggcacccagcatgggcaccctcatgggggtgtacctgccctgcctgcagaatatctttggggttatcctcttcctgcggctgacctggatggtgggcacagcaggtgtgctacaggccctcctcatcgtgcttatctgctgctgttgtaccctgctgacggccatctccatgagtgccatcgccaccaacggtgtggttccagctgggggctcctatttcatgatctctcgttcactggggccagaatttggaggtgctgtgggcctgtgcttctacctgggaacaacattcgcagcagccatgtacatcctgggggccatcgagatcttgctgacctacattgccccaccagctgccattttttacccatcgggtgctcatgacacgtcgaatgccactttgaacaatatgcgtgtgtatgggaccattttcctgaccttcatgaccctggtggtgtttgtgggggtcaagtatgtgaacaaatttgcctcgctcttcctggcctgtgtgatcatctccatcctctccatctatgctgggggcataaagtctatatttgaccctcccgtgtttccggtatgcatgctgggcaacaggaccctgtcccgggaccagtttgacatctgtgccaagacagctgtagtggacaatgagacagtggccacccagctatggagtttcttctgccacagccccaaccttacgaccgactcctgtgacccctacttcatgctcaacaatgtgaccgagatccctggcatccccggggcagctgctggtgtgctccaggaaaacctgtggagcgcctacctggagaagggtgacatcgtggagaagcatgggctgccctccgcagatgccccgagcctgaaggagagcctgcctctgtacgtggtcgctgacatcgccacatccttcaccgtgctggtcggcatcttcttcccttctgtaacaggcatcatggctggctcaaaccgctctggggaccttcgtgacgcccagaagtctatccctgtggggaccattctggccatcattacaacttccctcgtgtacttcagcagtgtggttctctttggtgcctgcattgagggtgtggttctccgggacaagtatggcgatggtgtcagcaggaacttggtggtgggcacactggcctggccttcaccctgggtcatcgtcatcggctccttcttttcaacgtgtggcgctggcctccagagcctcacaggggcaccacgcctattgcaggccattgccaaggacaacatcatccccttcctccgggtgtttggccacgggaaggtgaatggtgaacccacatgggcactcctcctgacggcactcatcgccgagctgggcatcctcatcgcctccctcgacatggtggcccccatcttatccatgttctttctgatgtgctacctgttcgtgaacctcgcctgtgcggtgcagacactcctgaggacccccaactggcggccccggttcaagtactatcactgggcgctgtccttcctgggcatgagtctctgcctggcccttatgtttgtctcctcctggtactatgccctggtggccatgctcatcgccggcatgatctacaaatacatcgagtaccaaggggctgagaaggagtggggtgacgggatccgaggcctgtccctgagcgctgcccgctacgcgctgttgcggctggaggaggggcctcctcacaccaagaactggcggccgcagctgctggtgctgctgaagctggacgaggacctccacgtgaagtacccgcggctcctcaccttcgcctcccagctcaaggctggcaagggcctgaccattgttggttctgtcatccaggggagcttcttggagagctatggcgaggctcaggccgccgagcagaccatcaagaacatgatggaaattgagaaggtgaagggcttctgccaggtggtggtggccagcaaggtgcgggaggggctggcccacctcatccagtcctgtggcctgggaggcatgcggcataactccgtggtgctgggctggccctacggctggcgacagagcgaggacccccgtgcctggaagaccttcattgacaccgtgcgctgcactacggctgcccacctggccctgctcgtgcccaagaacatcgccttctaccccagcaaccacgagcgctacctggagggccacatagacgtgtggtggatcgtgcacgatggtggcatgctcatgcttctgcccttcctgctgcgccagcataaggtctggaggaagtgccggatgcgcatcttcacagtggcccagatggatgacaacagcatccagatgaagaaggacctggctgtctttctgtaccatctgcgccttgaggccgaggtggaggtggtggagatgcataacagtgacatctctgcatacacctacgagcggacgctgatgatggagcagcggtcgcagatgctgcggcagatgagactgaccaagactgagcgggagcgagaagcccagctggtcaaggatcggcactcggccctgcggctggagagcctgtactcggacgaggaagatgagtctgcagtgggggctgacaagatccagatgacgtggaccagggacaagtacatgactgagacctgggaccccagccatgcccctgacaatttccgggagctggtgcacattaagccgtgagtgcagcaaaaacagccccagcggcactggaatctaggggtggaggtggggtggggcagacaagtagtgttagatgggccaggggtggggaccctccttgcaggatggctcatggcgacctgtgactggctacactacgtgtagggaccaatccaatgtgcggcgcatgcacactgctgtgaagctcaatgaagtcattgtcacgcgctcccacgacgcccgcctggttctcctaaacatgcctggcccacccaggaacagtgagggcgacgagaactacatggagttcctcgaggtgctgaccgagggccttgagcgggtgctgttggtgcgcggtggtggccgtgaagtcatcaccatctactcctgagcccagtgtcatcttgtggcctggagtcgaggtcttggccaggacataacaagctgtggtctggggtaacagcctcttcccagcacccacctgccagccctgcttgcctggccctgtcctggacccagctttgctaggtctccttggaaaccaggcctgggcctcaaaatggagatggatcccaggtcttgtgggaccctgggatgtttggggactttactatctagcaccccagtaggcctgtcctggccagagaagactggtaggggccgagtggggtttgaaggcagccggcccggcccagcccaggagcgctatttattgcatatttattgtttggatgtcaccatcagag

SEQ ID NO: 22824 - DNA, 1067 bp, Homo Sapiens
cggctcaagtgaactgactctgctagaacagtgccgtgcttttccacagaaggttagaccctgaaagagatggctcagcaccacctatggatcttgctcctttgcctgcaaacctggccggaagcagctggaaaagactcagaaatcttcacagtgaatgggattctgggagagtcagtcactttccctgtaaatatccaagaaccacggcaagttaaaatcattgcttggacttctaaaacatctgttgcttatgtaacaccaggagactcagaaacagcacccgtagttactgtgacccacagaaattattatgaacggatacatgccttaggtccgaactacaatctggtcattagcgatctgaggatggaagacgcaggagactacaaagcagacataaatacacaggctgatccctacaccaccaccaagcgctacaacctgcaaatctatcgtcggcttgggaaaccaaaaattacacagagtttaatggcatctgtgaacagcacctgtaatgtcacactgacatgctctgtagagaaagaagaaaagaatgtgacatacaattggagtcccctgggagaagagggtaatgtccttcaaatcttccagactcctgaggaccaagagctgacttacacgtgtacagcccagaaccctgtcagcaacaattctgactccatctctgcccggcagctctgtgcagacatcgcaatgggcttccgtactcaccacaccgggttgctgagcgtgctggctatgttctttctgcttgttctcattctgtcttcagtgtttttgttccgtttgttcaagagaagacaagatgctgcctcaaagaaaaccatatacacatatatcatggcttcaaggaacacccagccagcagagtccagaatctatgatgaaatcctgcagtccaaggtgcttccctccaaggaagagccagtgaacacagtttattccgaagtgcagtttgctgataagatggggaaagccagcacacaggacagtaaacctcctgggacttcaagctatgaaattgtgatctaggctgctgggct

SEQ ID NO: 22825 - DNA, 2316 bp, Homo Sapiens
gcgagcgaggaggatggcggagtcggggctcctgacggaactctaatgaatcattgattgaccagcactattttaccagttggaatgaatgatcagaaatgggcatagtgcttttagatccaacatgtaacagatggatgttactccatgctgattacttcttcaagccagtacttttttgattgtgtaggatctttgtctcttcatctttgaattcaattactggaaaataaaaggagttcatgtagtttttgtccaggcttgagtcaccatgagtagtagtttaggaaaagaaaaagactctaaagaaaaagatcccaaagtaccatcagccaaggaaagagaaaaggaggcaaaagcctctggaggttttgggaaagagagcaaagaaaaagaacctaagaccaaagggaaagatgccaaagatggaaagaaggactccagtgctgcccaaccaggggtggcattttcagttgacaatacgatcaaacggccaaacccagcacctgggactagaaaaaaatccagcaatgcagaggtgattaaagagctcaacaaatgccgggaagagaattcaatgcgtttggacttatccaagagatctatacacatattgccatcatcaatcaaagagttgactcaattaacagaactttatttatacagtaacaaattgcagtccctcccagcagaggtgggatgtttagtaaatctcatgacactggctctaagtgaaaattcacttaccagtttgcctgactctcttgataacttgaagaagctgcggatgcttgatttacggcataataaactgagagaaattccttcagtggtgtataggctggattctctcaccactctttaccttcgctttaatcgtataactactgtggaaaaggacatcaaaaacttgtcaaaactcagcatgcttagcattcgagagaacaaaattaaacaactacctgctgaaattggtgaattatgtaacctcattacgctggatgtagctcacaatcaacttgaacaccttccaaaggagattggaaactgtacacagataaccaaccttgacttgcagcacaatgaactgctagacctcccagatactataggaaacctgtccagtttaagtcgtcttggtctgagatataacagactgtcagcaatacccagatcattagcaaaatgcagtgcacttgaagaattaaatttagagaacaataacatttctactttaccagagagtcttttatcaagtcttgtgaaactgaatagtttgaccttagctagaaattgcttccagttgtatccagtgggtggtccatctcagttttctaccatctattccctcaacatggaacacaatcgaatcaacaaaattccatttggaattttctccagagcaaaagtattaagtaagctgaatatgaaggacaatcagttaacatcacttcccttggattttggaacttggaccagtatggtagaattgaatttagccactaatcagctcacaaagatccctgaggatgtgtctggtctcgtttctcttgaggttcttatcttatcaaacaatcttctaaagaagcttccccatggtcttggaaaccttaggaagttaagagagttggatctagaagagaacaaattggaatccttgccaaatgaaattgcatatcttaaggatttacagaaattagtcttgacaaacaaccagttgaccactcttcccagaggcattggtcaccttactaatctcacacatctgggccttggagagaacctacttactcaccttcctgaagaaattggtacactggagaacctagaagaactgtatttgaatgacaaccccaacctgcatagccttccctttgagctggcactctgcagcaagctttcaatcatgagtattgagaactgtccactcagtcaccttccacctcagattgttgctggggggccttctttcatcattcagttcttaaagatgcagggtccatatcgtgccatggtctgatataaatctgctggtcccacacactgttcaaaaatagactgccattaatgtttcttatctatatctgtatctatttatgtagatattggtatatggcagatttataaaaattgcattatgtgtttctgctaatagaggaatcatagccatttagaattttttttaaattctgtacaaaaggcttatataagttttctttgctgaatttgatggatgtttttctgttgtgtaatctgatatgccagtttgcttaaaacatttgccaacacattatgaagttattaaatttaagggac

SEQ ID NO: 22826 - DNA, 1685 bp, Homo Sapiens
aaaagttttggtgatgagacattcaggaagatctatcaataaatagcaaacctggtcctttttaagacactgtgtataaaaaaattccaaaaagattaaaatcagtgcagaaaccaaagaaccatttttttctatatcatattgatcatttcaagtggaactgttagctatcttagaaaaattgtggttctcaattggttttgcctctatctctgaaccaccaatcctaaagaaaaacattcaaccagaaaatttcagcacatcacaatctctctgaagattaagaagtctctgtgaaggactgaatgtataaattgaaaaatttttgctgtcacatttaggtaaaagagaaatcgttcttcatatccccttcctttccatctgtagctcacctatgtcaactttcctctcagaagtgaaataaaattaaagctatgacactgagtgtcagtcatggagggacacgttccccacttagcctttgctgaagtgtttccagagacaactgtctaatgccaggtccccacttagtgggctgcacttttctactcatttgcacataatccagaagtcacattttgggttcacagtttccactggggtaacctcattaggcctggccacctctgtgcttcttgtgaagtctctgatttgaaggattagtatcctttccagactgtgtgggttgactttcacccatctggagttgcttggaacaaagataactacctcaactccttgtcatgaaagcaaaaaaaaaatagcattagagttctgagaacaggatgtcattacgggttgtgccttgtcagctacaggtaagatatttgagtggctcctcaagcctccccaactccctctccaacctcgctacacagtcttcccaggtctggtatttgacctccagactgccgcccagaaagcaactcagagctcagcaacaccatgatgatgaaacacaaatatgtgggcccccaactttggagactccactggttgcttttgtgcagctctttctatatatgactttcaaaatggcagccaaccctctcaactgttggttgatctgaatatgtaaagttcagccttcaaacccagcaaacagtcagctataggatagagttcaggtgctggggaatgaccacggttggctgctacgttgggaaccctggtgacatcatatatggacctgggaatgtaaagaaacgtaggaaatctgaatttatgacttttctaatctctctatcgggatccttttttggaatcaagatgattttccttctaaaaggtcattttattacagtaatgggcagggtagacatacctcactagcgtactctcaaaatttcttgcatgcatatgctttctccggcatgcatatgctttctactacaatgtgaacaagcctacgaaagctagcctaatggaggatgagagaccacgtggaggagagctgaagtgccccagccagcagctagcctacacccacagctattttgcttgtgttccactcgtcctatttgcataatattgttctttaagttaacccattcttaatttattgttttaatcttaagcaataatattcaagaactaatgagttttgtgtattcattatatttttccataatatatattatactaataaatgcccattcaaattttaaaaaaaaaaaaaaaaaaaa

SEQ ID NO: 22827 - DNA, 2305 bp, Homo Sapiens
aaatccttattttattaacagaatactatcataaatagtattataatgctgttatttcaggtaagcaaatagctaaactgcagtacactctacagtagcaactcaggacagctggttacaagctggttgtcttaggacattggttacacggattcttagacactttaatggctgcgataactgtgactctccatgatccatgtttcttttatgcgcatatgatttgacgcacactcattcagagtcctccgagaggggcacccatacacggcagaagtgttcatctccaacatgaaagtgaccagctctcatcctcgtctccccaacaccataacgtcctcatcccgcctccaacccacaccaggccgaagccctcagagagtgttttcatcaggaaccactctcgaacctgaaggttgactttagcgtttagcaacccagggcggtgtgtgtgtttcccgttttgttttctgagtggtagcagtgatcaccgtaattccatgtagccatgtgctagcagaacccctgtgtcctcaccgtggcccgtgtgaccccagccgacgagtgcccggcggagcccccgctgccttcccatggtccagtgagctgccagggcatcacatgactctcagctgtgctcttgtcgcttctgtgttgtggtgacaccatgcgctccccagggccagacctgcacgcggcaggtctgtgcccgagtcacccacgggccatactttgtagtttcagcctttcgagccactgcagccgtcagtgctgtgctcctaagccatgggacccgaggactgccccccggcgcctgctcaggcggaggccctttcagaaagggcgaagctcacgcctgactctgcgggccgcggggccgcgttcccagtggacagcgtggtgagccgtggccggacggcaggaggagaggggagccccctctggctgtgtgtcaccttggctggctggctggccagggttttgccgatttccctcctcacatccctcccaccctcggtcatatcattgagatcaccgtaccagcaaatctgcaaaccaagcactttgttaatctccagagagagcaaatacagcaatctagagtttagcctttttaaaaatgtgactttaacccgcccacctgtgtcctcccattggcgtggcatttctttggtgtctgctcagaaagaaacagcatgggaccgtgtgattgggtccaggctgggctgtcagggaagcgccctggtgtctccgactcatcaattctcgggtcttttttaaaagccaggctccccaaagcactctttgtctcgcaattttgaggaggttgttccgacctggaagcgttaaactgctgcatgtcatctggcgtcagctgtgaggctgcgctctgcgtgttgtgcgtttgcaaaatgtattggcgtgactgtaaacacatcgttgaagtaaagcgattacatattgagtatgtcagcttttctcaccctcttctgtgctgggaggagagtctaactgtaacctttaggttgttccagaaaagattcaggccgtttggcacagaattgctctttctgaagggtagcagtaatgaataggaacagacagaaaaccccaggaggggctttcaggaaactctccctctccatcgccatcctgcaagctccacagcctcgggctgccagcctgtggcactgtcctcggtgtgtcctggagctgtgctgggcagcagggcctcgcgtaaggaactgctggaacccactgagcccttcccggggtttcccgccgcactcagtgtgttccttcaggctagtgaggtttcattctgttttatttgcaagcttatcaaaagtttgtggaagatacattgttgggttccagaggctggagtcatgctgcccacatcttgtttgggaaagcaaaagctcccagtgagctggtgtccccgtgtgtctttcatgggactgtcccctttagagatcccacctgtcagagccacagcttcggggtcctgtcatcacatcccctgggaggggaggcaggaggaggccgagggccccaggatgtctgcctggtcccttctcactgtgaggacgcccttggcacacctttctcaagtcacacaaattattgcagttacatacagaattgctgacaggagcaggagacgctgagggaaacagctggcaatgtgacaaaagtcttttctgggacaacaatcaaatcatgtatttgtatttttttaagtttaccaatgaattgtacaacaatgtaaaaataaagttcatcctaaaaaaaaaaaaaaaaa

SEQ ID NO: 22828 - DNA, 1867 bp, Homo Sapiens
gcttgagaaagagaactttaaaaattagagggtccctttctgcagaggaagggatgctcgcagggtggcagtggcccagccccagcctcagggacggggagggagagccccctctgggcccagcaggcaggtgttctgaggctggtccctcctcagtttccgcagccacaaggcgaaacggccagattctcactcaaggtcgttctcactccttttcctgtcccgtttccagtcccactgagccattcacttctgctgaaccatttttcttaggatgcagccgtctcactcccttgtcctgtaaatcgtgtattcatgttgatgattcttggagataggtttcactttttcccagctgcgtccacaggaaaggggagtcggatgccagctgcaccccgcctggctcgcacaggctaagaccacagacagagcagggcttcccggagccacacaggccacgcaccccaggaacccttgctgccgcgggccaggaacaggaatgtgttggtgcctgagacaccaaatggaagaagcacatcaagactgttctcctgcggccaacactggcccggaagccgccctccatacaggccctcagggggcctgccttctgcgcctcagtcccccgtgcatccctgggcctgggtatcacatgctctccaggaaagggacggaatcaatcgtgtgaccgatgggctcgcaaggatgggtgccgccgtgggagccctgcctctggtgctggcaagggattgggtttgtgtgggtgtctctagcctgcagagtgcagtgagtgagagtccttgggagcgcggcgctgcctgtagctgtgcctggggatgcacgtggccacgggatttcagtgggacagcgctcccacaggggctgggggtgggggtggggtttcttagttactgttggaaagggaaaaattcaccatatccaaggggagagacgatgggctgggtttgtttactccaacttcccttctacacccctcctgcaggacagtacgatttggggagaacccagctccccactttatctgcagactctgggacctgacaaaacagtcagagcctgagtgcactgcagcctgaactcccttgagcagcgctataagggactttgcactttaaaaaggggatgcctgtcagtaaatcccctgtgcattgactagaactggggggctgcgcccgctccctccttaatcctagatgatttgctcatgaaatagaggtgggggacgaccgcatgcactctgggaggtgcagccctaaggggtggactccagatctccctgcaagagacagcttggcttggctttggctgttggggaggagtccctgccatcccggtgagcctggggctgttgcttagggtcttctgggtggacacgtggagaaagagaaggcaaacgttggaacactaggaaaagctagaaattcagacaacacacatggatccccttaaaacatgtaaatgtgtcagaacacggttgacctgccgccttcttgaacctggtggcccccgttggaactatcagtggcgtctcccatgcacacgccctctgctttctctttcctagactcgcggtgctcacatccagacattaccttgttggtagcccccaagtggcgtgcagtgacaccagtatcttctctgttgcatttttgcaatcttgtgtcccgctcggtgatgttctacaaactctgttttaaggttgagaaagtttcaagggtgaagatctcaaaacagtgctaaaatcaaaggtgtttgctgtgaagaaaaacatgtgtatatattgcaccttgagttgtcagaaggtagaaactgaaataaactaactttaaaaaaaaaaaaaaaaaaa

SEQ ID NO: 22829 - DNA, 1729 bp, Homo Sapiens
gccggaaccaatgtgccctgggccactgggccgtgagcagccaccgactgggggcaacttggcacttagaaccgcagcagggacgtcggtttgctatcgggactcggcgaggacgatggaaatcctgtatgaatgtggaagccattagcagagtaattgctgtctgttaccatgacaaccagccgctgcagtcacctgcccgaagtcctgccagactgcaccagctcagctgcacccgtggtgaagacggtggaggattgtggcagcctagtgaatgggcagccgcagtatgtcatgcaagtttcagccaaggacgggcagctgctgtcaacagtagtgcggactcttgccacccagagccccttcaatgaccggccgatgtgcaggatctgccacgagggcagcagccaagaggacttgctctctccatgtgaatgtacagggaccttggggacaattcatcggagctgcctggagcactggctgtcatcctcaaacaccagctactgtgaactctgccacttcaggtttgcagtcgagcgcaaacccaggccgttagtggagtggctgagaaaccctggcccccagcatgagaagcggactctgtttggcgacatggtgtgcttcttgtttataactcccctggccaccatctcgggctggctgtgcctgcggggcgccgtggaccacctgcactttagtagtcggctggaagccgtcggactgattgcactcactgtcgcactcttcactatttacctcttttggacactagtgtcatttaggtaccactgtcgattgtacaacgagtggcgtcggaccaatcagagggtgattctcctcattccaaagtctgtcaatgtaccttctaaccagccgtccttgctgggcctccattcggtcaagaggaactcaaaggagacagttgtttgatgtttgtatggttggttggttgtttgattcattgtttggggtttggaagtgtctgcactggggtcatgcactgagcgacccccaagcccttccttaagcctgtgggtctaagaacatccagagcatattagcacatcactccaagcaacaacctccgccagaagaaagcaaatgctgttttacttcaaatgatggatgctgcaatcatatgatatttgctaagctgccaaacatgtttatttagcagatactgtatggaattttctgaacacctctttaacgtatgaggaaggttgtcctgctacggatgcaattcaattcttccttttttattactatttcaaacacacacacatatatatatatatatattaaacttagatgataatcaaaatcaaaaagtcaacgtaaaaactggtttcttggtttggttgggtcttatttgagttagtttgtttctcagtttctcgtatggattctttggggtactttggtagcctgagtggtctttttcatctctttcgcgtccattactcaaggagacagcataacagatgcagaacaagtcatatttgaagaatgttttgtactaaacttcatttaattattcagtttttaaagggaaaaagggcgtgagctcacacagtgagctgtttatttaaatatcattaaggagaaaaaaaaatatggtgagaagctcgctcctttcaacttgtttggtactgacagctgatagaagctattttctaataataaacatccagtgtgtgaaagacaaaaaaaaaaaaaaaaaaaa

SEQ ID NO: 22830 - DNA, 2036 bp, Homo Sapiens
gacagcttgaaccattcccctggccagagtggattcctcagctatggctccagcttcagcacctcacccactggacagagcccatacacctaccagatgcacggcacaacagggttctatcaaggaggaaatggactgggcaacgcagccggtttcgggagtgtgcaccaggactatccttcctaccccggcttcccccagagccagtacccccagtattacggctcatcctacaaccctccctacgtcccggccagcagcatctgcccttcgcccctctccacgtccacctacgtcctccaggaggcatctcacaacgtccccaaccagagttccgagtcacttgctggtgaatacaacacacacaatggaccttccacaccagcgaaagagggagacacagacaggccgcaccgggcctccgacgggaagctccgaggccggtctaagaggagcagtgacccgtccccggcaggggacaatgagattgagcgtgtgttcgtgtgggacttggatgagacaataattatttttcactccttactcacggggacatttgcatccagatacgggaaggacaccacgacgtccgtgcgcattggccttatgatggaagagatgatcttcaaccttgcagatacacatctgttcttcaatgacctggaggattgtgaccagatccacgttgatgacgtctcatcagatgacaatggccaagatttaagcacatacaacttctccgctgacggcttccacagttcggccccaggagccaacctgtgcctgggctctggcgtgcacggcggcgtggactggatgaggaagctggccttccgctaccggcgggtgaaggagatgtacaatacctacaagaacaacgttggtgggttgataggcactcccaaaagggagacctggctacagctccgagctgagctggaagctctcacagacctctggctgacccactccctgaaggcactaaacctcatcaactcccggcccaactgtgtcaatgtgctggtcaccaccactcaactaattcctgccctggccaaagtcctgctatatggcctggggtctgtgtttcctattgagaacatctacagtgcaaccaagacagggaaggagagctgcttcgagaggataatgcagagattcggcagaaaagctgtctacgtggtgatcggtgatggtgtggaagaggagcaaggagcgaaaaagcacaacatgcctttctggcggatatcctgccacgcagacctggaggcactgaggcacgccctggagctggagtatttatagcaggatcagcagcatctccacctgccatctcaccctcagaccccctcgccttccccacctccccaccgagaactccagagacccagatgttggacaccaggaaggggccccacagccgagacgacgtgtccagtgaccatctcagaagccgtccatcagtccaaatgggggttctgagaaggaaagtacccaacattggcttcggagtatttgactttggggaaaagggctggctcggagtctagactcttctgtaagactcacagaacaaaagcaaggaattgccaatttggggggtgcctggtgatgaggaggggatgggtttgtcttgtcttctttttaatttatggactagtctcattactccagaattatgctcttgtacctgtgtggctgggtttcttagtcgttggtttggtttggttttttgaactggtatgtagggtggttcacagttctaatgtaagcactctcttctccaagttgtgctttgtggggacaatcattctttgaacattagagaggaaggcagttcaagctgttgaaaagactattgcttatttttgtttttaaagacctacttgacgtcatgtggacagtgcacgtgccttacgctacatcttgttttctaggaagagggggatgctgggaaggaatgggtgctttgtgatggataaaaggcattaaataaaaccacgtttacattttgaaaaaaaaaaaaaaaaaaaaaa

SEQ ID NO: 22831 - DNA, 1499 bp, Homo Sapiens
ctgagcggcggggggcagtgtcgcctcggtctaggcacggcggcggagtcggtggtccctgcgcgatggccacctcggtgttgtgctgcctgcggtgctgcagagacggggggactggccacatccctctgaaggagatgccggccgtgcagctggacacgcagcacatgggaacagatgttgttattgtaaagaatggaagaagaatatgtggaacaggaggttgtttagccagcgcacctttacatcaaaacaaaagctattttgaattcaaaatccagtccacaggaatctggggtattggtgttgcaactcagaaggttaacttgaatcagattcctcttggccgagatatgcacagtctggtgatgagaaatgatggagccctttaccacaacaatgaagagaaaaataggctgccagcaaacagtcttccgcaggaaggagatgtggtgggtattacttatgaccatgtcgaattaaatgtatacttgaatggaaaaaacatgcattgtccagcatcaggtatacgagggacagtgtatccagttgtttatgttgatgacagtgcaattttggattgccagttcagtgagttttatcatacgcctccacctggttttgaaaaaatattatttgaacagcaaatcttctgaatgtatttgtttttaaaacttgtatttctgcactgttaaaaaatgttcatcatttaataaaactttacctggcctatagatgaaaatatattcttaaaaatatgcttgttgatgccgtctaaggaaccaatgtattcagtataccaccctgaagttgtgatttaaaatactttatgttttgtgaaatgaaaataagcatttgggcagtttatttaattcttatttaaataaatagaattatgggtttaattaacagtataacatgactatatatacatatatatttaaagggaattctttcttacataatatatttgttttgatagagatgtagagttgggtgggtgtttttgtcactctgaagtttagacctcattaaatatttgacatctacagttggataattttgccgcttagtgtccttttttatatacaatataacaaagtgagagaaatttatattactggcaatttcatttttggcagtctatttctgtatcatgtaccgcttttcttaaaacttaaattgcttattttgttgtgtaatgtcattgcttttgatttgctttgtgaaaggagataaacgtttcagtaattgtcagagcattttgttgcctcaggctgtgttacctcaatttcagagtaagtagtggttgattagtaatgtagtatacactggcagacatctagaatagtatgatgctttacatttaaatgaggttattcttttaaggacttttatttgtatgttttctgtaaggaataataaaataattgtaattaaggaatataccatactatattaaacacattcttcctaaaaaaaaaaaaaaaaaaaaaaaa

SEQ ID NO: 22832 - DNA, 1725 bp, Homo Sapiens
gtttgctgtgaaccttgctacttgtacttggttgaagttctaggtacctttagtcaagggatggaaaaataaagccatacgcagttttgttacctcagttaccccaaaaataggaaaagcagcaagcacagtattttaaagatcataattcctataaaaggactgtgcacaaagtgtttagactccattttcattaggcaggttgactaaaaatgattgcagtaacaggtttatataaaatagagcaacctttcatgctgtgacacaaatcaaaaggttgataactttgtaattttactctggagattctaaccgaagttggtgtaagttttcaagagttactaaaatcaagttggaaatgatttacgtacacttccctgagcctggactaaagcctcatgcctgtaccccaagtaggtgatggtacttttctatacaaaaaggatttcctggcaggcaggtatttacaaagtttgttcctgtaccagtccaataatgacaactctaaatccagctgcaccaaatcttagtgggccatttgtcatacctatgaaaattcttcagttattaaataactttgtcagtgctacctatggtaggccggaaacaatgtagattaggaagtttcatgaaaattaacttttggggctatggagaaacagttaagtatcttaagttactaaacatttccactgaatttttggagtgagccaaggttactataaaatactttggaagatgaattctctacctggagttagtttcgagagtaagcgtagcttttaacagaaataactgcagattttaagctcataatttgcaaaaaaaatcttttattggcatgaaaataatgttgtaaatggcaccaaatattccacttaaatgcatatacagtattagagtcaaaaactattttatccctctttgctgtttttcccccttctgcccactttcctgggtgttgggggggcccgctgacaacagtcacaaatccagcgacctaggaaaaaaattgttaatatagaatgaaaaattatctttacaggactgaattttaagcccatctaaactcttctgccttagctatcactaatgatattcctctctggattttgtggtgagaagggcactatgagttccttaatttaaggaaaaaatgtaaacttaatcaatgtaatcaatgccatgcaaaattcattgcaagtcaagggggatgggagagatgcaatgccatacggtgatacggacctttaagaaagtacaatctttcctgaaattcaaacactatcatacttcaaaaggtcaaaacccattccggaatttggcttttttaagactttttctctcctgctcactggcagctgtgtgtcttaacagcattctttcaagtcctggtgtactctgctgacagcactttaaaactttaacagcacaatgataacttgtactacatacttgatctgaattactacagaaaaataattatgttgcttgcttaatgattcccaggaaacttcgttgtaggcatatattttataagagtattatacagtgttaactatgcaagtaagttctaaaattacacaattatctgtgtaatgttttagtccaattactgtgatttattcaactctgttctaaagttatctggaattgtcatgctgcctcaatttacagaaatctataatagatttctatagaaatgtaaaaaaaaaaaaaaaaaaa

SEQ ID NO: 22833 - DNA, 319486 bp, Homo Sapiens
agattggagacttggagaccagaactcagatacaagaagaagaacaggcatagtcttctgtcaaaacaaaacaatgaacaagatgggggctgagggccagacctaagcctgagcctaggctgacctggtcacacaaagcccttgccacagtcctagagacaggataaggcctggcccttctcctcctataccaaatgctctttgtcacacattctcccttaatccagagctaggagttacgtcatcgtttctcaaacgttttggtttcaggatctctgcatgctcttaggaattagtgaggactctgaagataattttatgtgagttatatacgttaatatttaccatattagaaactaaaatcacttaaattattttattcatttagaatattaataatgcattgcatgttagaaatatttttatgcaaagtcagtatttcccaaagtaaacagtatagtgagaagagtgcatctttttacattttgtatgtttgtaaatccttttcttatgtgtctcattagaagattaatgaattttcttctccttcatttaatctgttattttggttaatctgttatgtttggttgaagtgtatgaaaaaaaatccatcctcacacaatgatatttttgttgctgttcttgttttgggttttgttggggggttttgtttgtttgtttgtttcttttggtctcatgctatcacccaggcttgagtgtagtggtgtgatcatagcacacggcagcctcgaattcctgggctcaagtgatcctcccaattcagcctcatgagcagctgtgaccacaggcacgaaacaccaccgcagctaattttgtttattttttgtagagatgggggtctcattcgaactcctgggtggaactcctaggctcaaatgattctcctgccttggcctcccaaaatgctgggattacaggtataagtcacctcgctaggccaggaatgtttttaataacatttttagaaaactggatattcatccttgatactacactaaaatgatagaagtgttagcttcttaaaggttatttgtaatgtggaacatgaaactatcaataactatttcacatgctgttacattaaaatatataggtccgacttccacattgaatgcttcttgtataatacatgacttttaaaaaaagaaacacaatttcaccacattatgtcttccagtgttgacacatttaactacaagttatcaaaaaatcacattttttaatattaccacagatattaccagaaaagattgttaagtattgggaagccatcaggcttatgatggtggatacaagttccccaggattctaattttctcttgagagcttgccttttatcattgggaataataccatcagttgattatgtggaagggacagggttatgttcgtttttgagaaagtgtcagccaaatattcaagtctaaatgataatcatttctgtcattcattctttcaagtaaaaaggatattccataaaaaatagactagtacaactcacaaaatgattttgtggacacaaacattttaatttgtttttgttttcgttttaagacagggtctcgctctgttacccaggctggagtgcagtggcatgattttggctcactgaaacctccacctcccgggttcaagtgattgttgtgactcagtttccctagtagctgggactacaggtgcgcaccaccatgcctggctaattttgtatttttagtagagacagggtttcaccatgttggccaagctggtcttgaactcctgacctcaaatgatccacctgcctaggcctcccacagtgctagaattaattgcaggtgggagccactgcgcctggcctcaaacatcctaatttggaatgtagtagaaataccttatgcgtacttcccacttactcatttaagatatattaaactgtggattctgggatagagatttaataaagttaataattctttgatacttcaaccaggacatatttaagtgaaacctgttttttcttctataattaagaagtggttaagaatataataactactatttcagtttggtaccatagcctcccttcttgtcaagttttactttagtacaaataatgtcttcattgtattataaaaatacttttaaccttgtggatctatgaaggggtttcagcagcccacaagggttccacagattgcactttgagaaatcctgttctgggtaagctgtggagagttcttgactggcccctttgcctcttcattttcccaaatttttctccccgagcaggactccctgcatcccaaaacttagctagcgctaagtttgccttgccctgggctcttatagaagagaacctatcacctgtaaattggatgcagagagtgtccttagtctgggaacagaggtggcaaatgtgtttccattttggagctgggaatggtttgcgcctaaaagcacaaaatagagatttcactcctgacccactttgaatttgcagtctctatgagaaataatattggccctttcatttctgttttttccaagatggggtctcacagtgtcacccaagctagagtgcagtggcatgataatggctcactgtagtggcgaactctcggggggctcaagccatcctcccacctcagactcttaagctgttggaactacaggcacttgccagcatgtccagctaattttaaaaattatatattttgtagagctaattttaaaaaatattttgtagaggtgggatcttgctatgttccccaggctggtttcaaacttctgagctcaagcgatcctcctgctttggcctcccaaagtgctgggattacaggcgtaagtcaccacaaccagtcaccctttcattttagatgtgtctaatgcacttgacttgaggcccacatagcaccaagagcagttatcttaatccatcaggctgctataacaaaaataccctagattaggtggcttataaacaaaagaaagatatttctcacagtgctggaggctgggaggtccaatatcaaggtgtcagctaactctgtgtctggtgagggcctgcttcttcatagctatcctctcactgcatcctcccatggcagaagggccaagacagctttctagaatctcttttataagggtacaagttcaattcatgggagttctgacctcatgacataatcacttcctctaaaacaaacccacttccaaatatcatctcactggggattaggttttattttgggaggagcataaaaatctctatagcagtagtgctgttcaatagaacattctgtgatgatgaaattgatctatatctgcactgtccaatatgggagccactagttacatgtggttattgagcacttggaatgtggctagtgtgataaagagttgattttttaaaagttttattcaattaattgaaatataaatagccatgtgtagctagtagttaccatttttgatagtgcttatctagagtgctcttagttttcaatctcccccacaaaaaaagataccttgtgactcccagattgaaatacattaaaattaccttcacatagaacccatggatttggctatgtgggtcttagacatatccctaaaatacagcaggcccaagaaagttcaatatgtattttaacaattagagtgtacgtatagattaccaaaacatgatttatcaactcaaggtcatacattttcaaaaatgcttatcaccagagctaatccttgtcaatatttcattgagactcttggtgttactgttttctataacctggtgaacacaaggaggtatataagtcattacttagcccaagagaaagtatttattgaagttgccatataaaatatcttataggctttgtagacatattttaaaattataagcaaatgatttaaactttttcatttttgagatagagtcttattctgccacccaggctggattgcagttgggcaatcatggctcactgcaacctccgcctcccaggttcaggtgattcttccacctcagcctctcaagtagctgggcctacaggcacacaccaccacacctggctagtttttgtattttttggtgaatacaccatgttggccaggctggtcttgaactcctgacctcgagtgatctgcctaccttgccctccaaaagtgctaggattacaggcgtgagccaccacacctgaccaggttttaaatgttaaaactccaccttagaactctttgcttcttgctcattccccccagctttctccccaaatcaaacatatctgtgtgtttctcttcactctgggacttccctctcttcatatcatctgtacctagatgaaaatagatgttaagttttacaattgtgaggtagaaaaggattctgtaagcatgacccaaatatgaaaagccataaataaaaaaataaaacttctctatgtcaaccacagactcacaaatatacaaacatatgcctgtgatcaaattcaaagacacataaataattggaaagacaaaaggtagcatatttcaatgtctttcagccaaagaccaccaggaacatctatagctgaacaactggggtttattactcattgtcacaagagagaatgcacaccatcttagcgtgaggatattagaaaaaatgcaatataggatttggtcttttagtggatgtttttggggagagctaacgaggtaggggttgactgtagatggggtgttgtcaaaaagcaggaacatttctacgactgtctcaataaatcttacccataataaatgcagagcagagcaaggataaagttgtggctggtaaagaaacagccgtcactcatattagccagcagggggagaggtttggtattttgtgaggtacacagtgccttggtttttgtctgtgcttatactaaattatgtagtgcccctgttttgtcttgttttatcatgttcccagagtgtccttgtctgatgttgtgtaatatggtttatgtccaagaaaagaataatatggcctagtgttgagcagtaggacagcttctaacagtactgaaacctactgtcagtgtcagaagtcaagagctgctttttttcttagtcaaattcaacatttttaagtcatcccaatagaaaaataataatattagaaagcaatatgggaaagaataaatcaaatatcagacaatatactctgattaatgaatatgaggaaaaatgagaacatgacattagaaatgcgaatgaaaattaaaatctgtcagtttggcatatgtgaaagtaaatgataagcatattatccagaggtagggaaaatacactgtcatgaaggctgatgaaaaacgggtatactttgggaggccgaggcaggtggatcacgaggtcaggagatcaagaccatcctggctaacacggtgaaacccgtctctactaaaaatattaaaaaaaaattagctgggcgtggtggcaggcgcctgtagtcccagctacttgggaggctgaggcaggagaatggtgtgaacccaggaggcggagcttacagtgagccgagatcgtgccaccgcactccagcctgggaaacagagcaagactctgtctcaaaaacaaaacaaaacaaaacaacaacaaaaaacactggggtataaatttctagaggggacttttgcgaaacatgttaacaatataaatggacttacatttcaatgcatatatttctctttcaagaatttttcctaagaagataactgcacacattctaaaaaatatatgttcaaggatgtttcttgaattttggtttataaaagcaaaatgattgaaagaatccaaatgctgtaatcaatatagggatagtagctatgagtagcagaacacttaatatacctcaaggtataataccatgtgttttactgagagagtcaaatttgatcttcaatgcaaacccatgagaagcccgatatgtgatatctttgtatagacagggaaagggagactcagagaggttaagcaggtggtgggggtggagtggacccagggaattttctcttaatggaatcatctttcactgattccctgtccatctggtggtggatatgacgctgtatcccatgccagtgaactctttcaatgtccctgaatgttctatgacaggaggtcatgagatacagtgctcaggagaacatcaaggggcaattgatcaaggaagtctgatttccctgcctaaccacacttatatttcctcattcagcatgtatttcaagtcctctgatgaatcatgtgatctactagaccctgaagatacagtgaagagcaaaagtaagatgctggcaatttgatgtttgcactgtcatgaaggagatgcacatttagcagaacttacaaagagaaatataaaattactgctgagctaagtgtggtgaagaaaagttcatggtaccatgaaagcagataaccaggagatctaacaggtccactaccactattctcaataatacctaaaagaaataataagatatggcatttataaatgatgaataggattttataaaattatatacaatcagagaaccaaaaagcactcttggaaatcaaaaagtgatcatttaaataagtatttcaatagatcacttggaagagtaaatttgtactaccactaaatattaaaaatggaaaaacaatgtcaagaaagacagaaaaactatacgaatactaggctatcagtcaaggatttcctgcaacttaataatacaaattctaaaagaatggaaagatagaaattatttaaaataaaaaaatttctccaagtttacagacaaaaatttaacttgtaatggccccaaccaagttcttactatagtagatgaaaacagacccacaccaagacacatcacaatgaaattttagaaggtgggtggaaaagaagaaatcccaaaaacatcaaaaggcaagaaaaacaacattagaagctaaaaaatgttgatggaatgtcatggaaattcctaggaaaaatgttttcaatacagaattccataccaagtccaggttggaataagtgctagggtagcccgaagacattttcagaagcttaggctttcagattttactttccatgttcccttaggaacacagatgaaatgagaaacaaaaatgatggagaaaaccaaaaaaggggacacatgggatccaggcaataggagagccagcataagagagaggcagagggatgcccaggatgaggtgaagacgatcttggaaatcagcccagatgtgcatgcaccagtccacgtgtggcaggaccaagggaagtgtcttcacaaagatgaggttggtagaacacggggcatggttgaatatattcatggagactgtcttagttcatttatgctgctataacagaatgccatagtctgggtcagttatgaagaacagaaatttgttttctcagttgtgaggctaggaatccaagatcaagccaccagcatttggcaagagccttcttgctgtgtcttcacatggcaagtgggtcaagggcaagagagaggacaatattattattatgggctcactcccataataatgatattaatttgttcatgagggctctgcgctcatgactcagacagcttctattaggccttactttccaatatcactgcattggggatcaagtttccaacacatgaactttggggaacacattcaaactatagcagaggccttggagggaaatttggaagagattttataatgagtacaacagaaattaagcacatgaagggataaaacatttattaattccagggaaattaaaaagtcaattccaggaaggaaaataatccttgtgaatagcatttcctaatctaattgtgaacagcatttcctaatctaattgtgaatagcatttcctagtctagctgtgaatagcatttctgtggtcataataatataaatagtgaacacccagctaaccaaaattataaaataactatattgagaggagaggggtatatgaaagggagctatacactaaggatgatacataagagtgaaaaacaaaacggcactataacacactatttggaggcacagatgtaacgatcaaaaaattaggcagaataaagtagattgcctctaggattcaggaaatggtgtacatgaaagattggggacatctgtgttcataacaagccttgtagaagtatttggcttttgaaacactgtccataaatccatttgatgtattaaaaacatcatgagacaattgactaaggaattattctataaggagtgtcagagaaatggggcggtaattggagggagacatggaatcaggcaatggatttatttattttatttttaattgttttgcttccacttaaattgcatgttttatttctcccaatcccagcaatagcacagaagccccatcatatccatcccaaactggtttcgagtaggttaaggttattgggacccttgtcggaacattgatacaaagagctcccaaacaccgggcacaaatgtgtctgcaaacagatggaagtaaacagtgcactggcccaaatgcttcatgagtcagtttgattttgcaatgcaattttcatccttgaaacggccagtctggagggggaaggggtagcgtgagggagtgaagttgaaattgcctcctattagctcactctttcatcattaaacagagaccaagagagaaatggttccaacatttcaccacatatatttcttcttatgcagtctaagctgagaatgccatgtaaatgggtcactgcaaaatgtagcaatttaatttctctccaatcaaaataagaaagcagtacgatctcacttctattaacttttgaaggtttacagcagttaaagtatttttgcttatttgtataaaggttaaaaaaatcattttttaaataaaatacaagagcagccaatttcaccatcgagtaaaagtaaaaactgggattcttttttaaattagtccaaagtggcatttaggaacttagttgtaggctgctacgctgacaccgtgacaaaccaaagtgtagggttgggtctggttttgtttctgttttcttttcaatatccagtgctcatggattaagttctggaaatgttccaattgtaaggcagggatctgtttggattccatcatgagtatgctccttgggttggatgctggagagtgaggcatgttttgccggacccatgtcgactacctagtagtcatcaaggtaaaaaaattcatcgtctcctccttggtattccattctttggaaatccacttggtaccacaagagacctccaattctaccaaatcctttcacaaactgagacccttcttgtgatttatatgtgacaatttccaatgtagctccgacttttttatagttgttagcaaaccatttcaacaggggcatgctcttgataagcgcatgttcctgcctggtctctttgtctgtgaaatgagatttatccttttcttgctctggagttagagaattttctcctcttttgtgccttggcaatgaagaacatatctcattatattcagattttcataggctattagaatttctacagctcccatttccaaagcctttagtgtatcttcaacaccaaaacagtacctgcctgtgtcctggctgatttcatcaatgtatccctactaatttcttcttttgaataaatttcactttggagaggacttcagtagatagcccaacagcttggttgaatccattttcaccaccataggatatatcaactaatttcttttttttgagactgagtcttgccgtgttgcccaggcgggagtgcagtggtgtgatctgggctcgctgcaagctccgcctcccaggttcacgccattctcctgcctcagcctcccaagtagctgggaccacaggcacccgccaccacgcccagctaattttgtttttgtatttttagtagacacagagtttcaccgtgttagccaggatggtctcgatctcctgacctcgtgatccgcccgccttggcctcccaaagtgctgggattacaggcatgagccaccacgcccggcctatcaactaattttaaaactttcgattgtaaccgctgatcaaacgtatcagattgacttagttcagttttaaagtcagcggatccagctaaaactagaccagccaccttccctttgtccccagaaataaacagctgcacagcagtctctgctactttctgaacattgttaggtcacttttccattcttaaacaggcaaaacgcaaggctgactgacctttaccgtgtttctttgggagatccacagtgagtttttgcaggacttctcttgtgtttccttggagggtgccaaaaagtgcaccactaccatctattacgatgaatccagacttgctttcatctgaaagtagtgctgtaagagcttctgtatggaatttgttgtcacacaaatacaatgatgtattaattggtttgaaatgttcaaaatcaatgttaactttcttgtgcacatttataagtagataggcaaaatgaaggaaaattcagaactgaaatggtcattatttttaaaaaccagcaattatagagttaacatgtagaagttctctctctctctctcttttttttctgcctactttgaacatgatgacatttctacaggtgttgagataaaactcactgcttatggcatttcagtcaaggaaagaaaacagccttaaaggctttgaaattaatggctttacagattacaatagctccatggtaatcaaccacctagacacctttttttttttttttttgagatggggtctcactctgtcccccaggctagagtacagtggcctgatctgggctcactgcaagcgccgcctcccgggttcacgccattctcctgcctcagcttcctgagtagctgggactacaggtgcccgccaccacacccggctaattttttgtatttttgatagagacggggtttcaccgtgttagccaggatggtctcaatctcctgaccttgtgatctgcctgcctcggcctcccaaagtgctgggattacaggcgtgaaccaccgcacctggctgacaccttttataaatataaatttaggtttccctaacaactgtgtacaataatgaaacacttaattgaaaaattagtaacataaaagaaaaaaaaaataaatgtttataaaagttaggctctcagaccaaataggtcaaaatcttgatctcagagcaataatagaaggtatccctgttcaacagaaaaattttgttttttgtgccatgcaaaagccaaaaagaaaaaggtgaagaaaaaaaaacagctaaaattcttccctccccacatttgctaattaagcaaacaagactggtaaacaaaagattgatttgttactaattcaaggctacttggagatattttgcttatacaattcagttaaaaagaaacccataactcacttgaaacaacaacaacaaaaaaggtgggggcaatgaaagaagtttttttaaaaaatctaactgccacggaaagtgctttacccaaaattttggtccatagctctcattagattataaaggcaactgaagtttaacctggacacataaaatataccaagaatgaaccaagaagaaattaaaaacctgagcataccaataatgagtaatgagcttgaatcaggaataaaaagtctcccaacaaagaaaagcccagtactggatgccttcattgttcagttccaccaaacatttaaagagagactgacaccaattcatctgaaactattccaaaaaattgaagggggaaggagttctttcaaatttattctaggaagcaagcattaccttgttatcaaaaccagggaaggatacaacaacaaaaaaactacacgctgataaacacagatgcaaaaattaacaaaatagtagcaaactaaatccacaacacatcaaaaagattatatgccatgatcaaatgggatttgttccagggatgcaagaatggttacatatctgcaaatcaataaacgtgatagatcatatcaacagaatgaaggacaaaaataaaatgatcatctctagatgcagaaaaagcatttggtaaaattcaacatcacttcatgattaaaaactctcaaccaactaggtatagatgaaatgtacctaaatacaataaaggctgcatatgacaattcgatagttgacaacatacataatggaaaaaaagttgaaagatttccctctaagaattggaacaagataaggatgcctgcttttaccaaatttaacatagtactagactgattcctatggaaatggatagaaaattttaaaagattacagcaatgacaacaacaaaaacacatagtactggtccgacccagagcaattaggcaagagaaggaaataaaaggcatccaaattggaaaagaggaagtcaaattgttgctgtttgcagatgacataatcttatttatacacaaacctaaagactccatcaaaaaactctcagaactgataaacaaatttagtaaatttacagaatataaaatcaacataaaaaaactgtagactttccatacaaatcaataaacatgatagagcatattagtggaatgaaagacaaaactaatattatcatctctatagctgcagaaaaagcatttgataaaattcaatatcacttcatgataaaaacttccaaccaattaggtatagatggaatgtacctaaacacaataaaggccatagaggcaaactcaaaatgatgaaaaatcaagaaagaaatctcattcacagtaactataaaaaagcatgggaataaatttaaccaagtatgtaatgaaaactataaaatactaatgaaacaaatagaaaaggacacaaaaaattgaaagatattccattatcatggattgggagaattaatattgttaaagtgaccatactacccaaaccaatctacagattcaatgcaatacctatcaaaataccaatgtcattctttatagaaatagaaaaagaaatcttaaaatttgtatggaaccacaaaagaccctgaatagctaaaacaatcttgagcaaaaagaacaaagctggaagtatcacagtacctgacttcaaaatatacagctatagtaaccaaaatggcaagcaaggtattggcataaaaacggacacataaaccaatgagacagaatagagaaccccgaaataaatccatatatttacagttaatttcttttttcttttttttttatttgagacggagtctcgctctgtcacccaggctggagtgcagtggtacgatctcggctcactgcaacctccacctactgagttcaggcgattctcctgcctcagcctggaatgacagtcgtgtgccatcacgcctggctaatttttgtattttagtagagacggggtttcaccatgttggtcaggctggtctcaaactcctgacctcgtgatccgtctgcctcagcctcccaaagtgctgggattacaggcgtgagccaccgtgcccagccactcaatttatttttaacaaaatcaccaagaacatatactgaggaaagggcagtttcttcaataaatgatgctggggaaactggatatccatattaggaagtatgaaactagactgctatctctcaccattcacaaaaatcaactgaaaatgagttaaggacttaaatgcaagacccaaaactatgaacctactgggagaaaacatacagaaaacactttagagtgttggacgcaggaaagattttgtgattaagaccttgaaagcacaggcaagagaagcaaaaatgtatgaatgggactacatcaaactaaaaatttcctgtacagcaatgaaaacaatcaacagagataaaacagcaacttagagaatgaaagtatttgcaaagtattcatctgataagggattaatagctagaatttacaagaaactcaaacaacagcaaaataataatagtatcattttaaaaggagcaaatgtgcacccatcacccacgcagtacacactgcacccaaattgtagctttttgtccctcaccttcttccctccctttccccgagtccccagagtccattgtgtcattcttatgcctttgtatcctcatagttttgctcccacttaagagtgagaacatacgatgtttggttttccattcctgagttacttcacttggaataataatcttcaatcgcatccaggttgctgtgaatgccattaattcattcctttttgtggctgagtagtttctttatccactcattgattgatgggcatttgggttggttccacatttttgcaattgtgaattgtgctgctataaacgtgtgtgcaagtatctttttcatataatgacttattttcctctgggcagatacccattgtgggattgtgggattgctggatcaaatggtagttcaacttttagttctctaaaaaaatctccaccttgttttccatagtggttgtactagtttacattcctatcagcagtgtagaagtgttctctgttcaggccaggcacggtggctccagcctgtaatcccagcactttgggaggccgaggagggtggatcacgaggtcaggagatcgagaccatcctggctaacacagtgacgcctgtagtcccagctactcgggaggctgaggcaggagaatggtgtgaacctgggaggcggagcttgcagtgagccgagattgcgccactgcactccagtctgggctacagagccagactccgtctcaaaaaaaaaaaaaaaaaaaaaaaaaagaagtgttccctgttcaccacatccatgccaacatctattattttttgattttttgattatggccattcttgcagatataaggtggtatcacattggcgttttgatttacgtttccctgatcattagtgatgttgagcattttttcatatgtttgttggccagctgtatatcttcttttgagaattgtctactcatgtccttagcccactttttgatgagattgtttgttctttttcttgctaatttgtatgagtttgttgtagattctggatattagtcctttgtcagatgcatagattgtgaagattttctcccactctgtgggttgtctgtttactctgctgactgttcttttgccgtgcaaacactctttagtttcattgggtcccagctatttatctttgtttttgttgcattttgcttttgggttcttggtcatgaaatccttgcctaagccaatgtctaggaggtttttttcaatattatcttctagaatttgtatagtttcaggtcttagttttaagtgcttgatccatcttggttgatttttgtataaggtgagagttgaggatccagtttcattctcctacatgtggctagccaattatcccagcaccatttgttcaataaggtgtcctttccccactttatgtttttgtttgctttgtcgaagaacaattggctgtaagtatttgggttcatttctgggttctctattttgttccattggtctatgggcccattttcataccagtaccatgctgttttggtgactttggccttatagtatagtttgaaatcaggtaatgtgatgcctcaagatttgttctttttgcttagtctcgcttttgctatgcaggctttttttgggttttatatgaattttaagattttttttctagttctgtgaagaatgttcgtggtattttgatgagaattgcattgaatttatagatttcttttggtagtatggtaattttcacaatattgattctacccatccgtgagcatgggatgtgtttccatttgcttgtgtcatctgtgatttctttcagcagagttttgtagttttccttgtagaggtctttcacctccttaggctaggtatatttctaagtttgttttttttttttttttttttacagctgtcgtaaaagggattgagttcttgatttgattctcagcctggtcactgttggagtataggagagctactgatttgtgtacattaattttgtatccagaaatattgcagaatttttgtatcagttttaggagctttttggaggagtctttagagtttcctaggtatacaatcatatcagcaaacagtgacagtttggcttcctctttaccgatttggatgacctttatttctttcccttgtctgactgctctggctaggactttcaggactgtgttgaagagaagtggtgagagtgggcatcattgtcttgttccagttctcagagggaatgctttcagcttttccccactcagtattatgttggctgtgggtttctcatagatggctttgattacattgaggtatgttccttgtatgccgattttgctgagagctttaatcataaaggatgccagattttgttgaatgttttttttgcatctattgagatgatcatgtgatttttgtttttaattctgtttatgtggtgtgtcacatttattgacttgagtgtgttcaaccatcccttcttccctggtatgaaacccacttgattgtggtggattatctttttgatatgattttgaatgtttccatcacaaagaaatggtaaacgtttgatgtgatgcataggctaaatacccttatttgcttattacacattgtatacatgtatcaaaatatcacactgtactatatcaatatgtataattatgtcaattaaaataaataaaaatagtagccatgactttaaataacttaagaaataatataatggaccaggggatgaggaaataacatgacccagccgtgaccaatcagagtttcccacactgtaccacatctccataacaacaggtattggtccaaaggtcatcttctctggttctttatttatgaacattgtgagaaagatgtctatttttctgctgaagctgttaaggtagaataatatgagaggagttggagctgataagctgatattggctatcttctttagaagtacagagagatctgatgacaaatgtatctccgaatctaatcatgtctctaggcagcctcacccctggcctttccagataaatttacatgttgaatcttttctttaaaattattaacttgtgactaaaaaggtcttgcttctataacacaaatattatttgtttttaagtgaaggccaaacagattttaatgttctctccatcagtgagctataattactagaagtatagtcctggacacatcacttatattaacctttctcattcctagtgttacatctgaatcttgaagacataaaatgagctttgacctagtataaggattaggaggtagaataaatgtaaagtaccaggacctgacacttggaaagtttttttaaacgtctcagctcttttcatcatttgtaagctgcactattaatttattaacagtttttgagggaaaacttaaatctgcattaaacatttgcagtgtttttggctgattggcatacttatatttatcctttcaattatgtaatattttcccatccatagccaaattttaagacttacatttttgagaaatatagagtcaaaagcattttctgacttgacttaggccacaggttactctgcacagcatcactgagacacacctatctgtaaagcttttcatatacataatctccaagacatataatgctgtatggagacacttgaatttccacaaagatgctggacatttcatcaggaccttatggcgctggaggcagataagatctttcagaatcaaattagcaccccttggcctgaagcctcacatgctgagatacagagttcctagggtccctcctgaatatggtcttcaagatgaagagaaaatgtcaggctatgagattcaaaagagaggagtcagagaaacacctcccctggaatcaggaccaattttagttttgagatttagtcaaagaaagatatagaagctaaatatagggccacaatttgaagacataagaaaggtaagatttcacagtgttagtgctgagatggggccagttgtacaatatgatcccagaatctcagtgctgacatcattccaagtttaatcttccaattctccaactcagaatgtcatattttcctccttcactcccacgtcacctcctgtagggcacttctgcatggcgtgcaaagaatctcccttgatggctattttctgtgcttgcccctggagtcttctctgtgttgcacctgtgatcacactgttctataaccaggttcttcccccagaggactgagggctccctccatgtatctccagtacttagcacaagatgagttttattgcatactttacttcatttttatcatatattatttaaaaatggttctacaaagcttatagtgaaaactcttaacttttcagagacaggaatttttccctgtcccacatctcctaatctgaaaatttctgttttgtagaagcggccactttttgttcttcaaaaaattaaacatagaattgacatatgatccagcaattcctcttctgggtacagacccaaaagaagttaaagcagagaccaagcagatatttgtacatcatgtttataacaacattattcacaactgccaaaaggtagaagcaacagagtatacatccatcgatggatgaacaaagtatggtagatccatacagtggaatatttttcagaagaaggaaggaaattattttcctgtattatgtatgaaccttgaagacatgaagctagattaaataaatcagactgaaaaggaaaaatattgtatgaatccacttacatgattcacctagtttagtaagattcatagacagaatgtagaatggaggttatcaggggctggggaggaggagagagtgaggagatgttgcttaatagacctagcatttagtttgggaagatgaaaaagttctggagatggagggtggtgatggttacacagcatgaatatacttaatgtcatagaactatacacttaaaaatggcaaaatggtaaattttattatatatttttttaaccataatttaaaaaagcagctactctagtgctttaaatagcttcttcttatccttatctccatatttctttatttcttgttcaaactttttttattttttatttttggagacaaggtttctctctgtcacctagactggagtacaatgacatcatggctcactgcagccttggccttctgggctcaagtgatcctctcacctcagcctcctgagtagctaggactacaggtgcaagcccaccacacctggctaattcttctgttttttggtagagatggggtctcactacattgcccaggctggtcttgaactcttggcctcccaaagtgctgggattataggtttgagccactgtgcccagcctcaaactttccattatagaaaacttcaaatacacaaaaacagaattatataatgaattctcattatccatcatcacattcaataattactaacatttgtccatcatatttcatatgtttccacttttttccaggagaattttaaaaaatagacttcagttctagaacagttttaactacaggaaaattgagaagttgtttctcctgttattaacatctaacattagtatggttcatttcttacaattattgaaccaatattgatgcattatttttaaccaaaagtcatacattactcaggtgtccttgagttttacctaataatatttttctactccaaggtcccattcaagataccctattacatggggttgtcatgcctccttaggctcctcttggctgtgacaattcctcagattttccttgtttttgatgacctagacgttattgaggaatactagttaggtattttatagaatgttcctctattggaattcggtgttttttttttgttttttttttttttttcataataagtagaggttatggattcggggggaggaaagccacaagtgaggtaccattttcattacatgatatcaagaattcacacttccagaagagggagttaatgctgttcctttaaggacaaagtatctacctaccttatttggagttcttctgcaggagagattttgcctcctctcctccattgatttatttatcacatcatttatatcattataaactcatctctggaggattgtaaaagcaaatcctttacatacaatttcacagttaaatagttcagcatgcatctttcacagaatagggtttttaaaaaacataaagccatgctattctcacactaacaaaattaacaacagttctctaattttgctaaacactcaatgcatattcaaatatctgtcttgtctttttcaattggtctgtctgaaacagaagctagagaaggtccacacattgcaattgcttcttatgtctcattattctctgttcttctataccataccacccaccctacctattttttttttctcaaggctttgatttgttggagaaactgttaccagaaaaacaggtcccgatcccgaccccaaaagagtattcttggatcttgcacaggaaggaattaaaggtgagtcacagagtgcagtgagaaggagatagtttattgaaagttactcagatacagagtaggtgtcctcagaaagcaaaaggaagaatgcaccatctttgttgtaaactcttctaatgtaggggtttaatctacataaaagctaagttaaatgtctatgtgtgggtgctctgacagcatgacaaaatttaggacctattgatttaaagaaagttatccttggcattttagttagtatatcaaagcatgactataataatcttaaaagcatatattataatgtgacgtcaggacatgtggacattctgttgtctgtcataggcgtttgttcttgcaggcattattaagttgtttaatcagctgtaaacctcttatgaccatgggttgtgactggcaaggaatatgccttgctagttgaaagatggagttgactttaaaatggtgtcaccctggctctcctatgcttctgtttccccaaaaaagccaggttacttgtcctgtagaatgatccacattctgagtttggctaatgacattctcatggtattaacttgtttctttatatgttgttttttctgttacccacaaaataattcttctgatacacatttgtaatcttaccatgccagcatctgctactcttcatgttaccaaatttctgttcaaggaccactaaagccacagtcagtggacattctgagacctctaggggagggtggagatgctgtcctttaatatagtctgacccaagcaacctccccacttggcatggtgaatctagacaagctaaagaatttactacgccccaggcctgcaccagccctctcctaagaccttgggcactctcatttcccttttttttttttctaaaggaagtcatagtttctcataacctttgctagtgatcctggaccttggttgttccctgaggctgtgttctccacactgctgccatcactgctacagcagaggtgcagaaagctcaggagagagaagggaggaaaagctgaagattttgtgttattcatgctttcctgactccggcgaaagtgcttcctccacctgcaaccatttctgtttctatactgctgagtcttgtgttcccaagaccaagggaagcccattttctttaaagccagtcacagtttctgttggctgatggaatatctgttgtccagcagttgtattcctgctcacaaatgcaaaacagtttgatgccacgcacattccagggcttagactggaaatgctgtcccttgcccctttgttaccttctgacagggatcagtccatagtgtagttggtgtcacaacagtcccgaagaagccttccaatagatacccaaatgtgattcaaagtggcacaggcacacaccacggtgccacatggtgcctatgtaaagcaggtatatcaggaatgctaagcagagaagtagcagaacacactgatccccatgttctcattgtacagttgggtgcaattaagctggcacaatggactcttctcatggctactgttccagtagtgtggatgcccccaaatgctgcatatttactaggacagccaggcagagacagctgtgtactatgatacaacagtagtccctcttagaggaagtgaccttgttagaagtgggagtttctgaagctcttcagctgttactggcctgctcttccatagcgttacttcagacctgctggcccagctatccactccgctaacaggtctgtctctgctaacaggtctagctctgtctcctcagcacatgttctaggctctgactgcaagtgctgacttgggctcccagccccacacagaccctctgttccatgaaagggccatctatgcaaagtgccccccaaatgccaaaggagccaataaaccaaggaacaagacagacaaatctagttgtcagtaaagagtgttttattggggaacttacagacagaagcgtggtcttggatggcagcaagacaggtaggtttctgcacttattacccccacacccagggcttatataccacaggggaagagtatacatgctctgtgcaagacaaaggctactactgtccagaacaggtaagaatgctaatgtgtcatagcctagaatttgtataacatcaaggttgacatgttcttacaatagggatggtaaataaagtgggaatcaggagtcagtcctgggactggggctaatcagaagtcagcatagagaattagcatccaagagggagtcacttttctctccacatcccagccctctaatccagctcttacaatctcatggactcacatttcccccatagtccctgagccttcagagagggctgtgggtgacattttgatggtgtgagtgacacattttatcaatttgttttctacttgttaagcaggggccacagcaacaacacaaacaacaggcgatgatatgtatgccaggtgtaagacacagaattaaaaatgccctttaccatgtttattcaggaaccaaaccaagaggtatagagcagaacaacaataggaacagaagactatgggtggaattaaaaatgtttagtaggtatttggtgggcagttcttccccattaaacagaattactggtagctccatctctgttgattaggaacataggattgtgggctgggagtacacaccaaacatgttgcctgaggggcaaaggcgctggtattatgtgtaaggttacaggggcagcaaaggaccatgtcaaatggccagccagggtgcttcttaaaaggggctgtgttccagtttattggtatgtggagtgttttggcccagacttcagcaggatcaatggagaccactttagttggtagggaattccttgctgtctggaaagaaatgctctatccaacataggggaagttgctagtccaacccccattcaagtgtctcctccctggctcaagatcttgaggagttctaaataacctttgccattggccttttatctgctcaggtcagagatgcatctggttggactttctttactattatggttaatggatccatctctgtggtggtcctgagtcattggtgtggtgccagcaccatatttgtctcaactaaattaaggtttctaatggcttgaggcaaaatctttgtctaactatgaaagatattggattttgagagtgctcaaaactgtgccttcaaaataccatttttcctttcaatcaaccctgttgcttgggggagtatacagtaagtgaaatacccagtctatgtccctttcatgcatccagtcttggacaccgtgtctggtgaaatgcatgcctcgattgctatcaatatgtggagggtatccttacatgacactgagttgctccaagcccctgatggtggctgtttggtttgctcttacaagggaaagcttgcaacaatcccatggcagtgtatacacatgttagtgcatactttcgtctcaagattactggcaagggtctgatgtagtctatctaccagtctgtcacaggggtggctgtcttatgtatatgtccaggtgtatgtgggatgtggcagaggtacagacgggaacaaattaagcagtttgctaccgccaccactaaatctgcatagcagagagccaatcctgctccctttgctatttggcagcccattcatgcactgaaatccccactgtgatatgtacctaatcaactagctcagtattctaatttttgctaggatgtctgcctccatgtttctgggaggtgaatctgaccagtgtgctgaagcaattaggtccacagtgggttcctgtagacttttccaaatgtctttccacatatcagctccccataaggatttttaaattatataccaatcatctcaggccctttgggcaagccaaattgtaagacccttaagtactgccagactgtctgtacagagaactataggtggtggctcacgggtacaaaccaaccatgtagcttggagttctgcccattgactgctctgttgcattcccatctcaaaccagatactgtctgtggttgtgcagctactactgtccatacacagggttaccttggctcaatgcatctaagtaccaagcattatcaggaatgagggccatgccttcatgtaccattggagacatctcctgtgagggctccacaataggggcagcactggactcataatgtactggccctaagatagcatgcagttcatctcttaagggatgcatggagaaggcactatgttgttgcatgtatgcatggcacttttgtaaagtggaaacttgggcaatagctgatacaggcctggcaaacactcctacccagtccttgataggaaacctgttctccctggtaccaggaaagcagcagttatggattcaacttgtggcaagaccttctatatccccaggacctgttattcaactgggaaatagcaggtttcagtacccttccattaattgtgactaaaattctaaaggaactgcttccctatgctggactttatattttcatcatccaaaattatagtttagttttacctttaaaaatatgttttttgttctcatttgttccataggtttctccttgaaatttatattgtatggtaaggtttcctattgtttgcattttgtggattgcacgccaaggtgtggtttaatgtatttctattacctgtattttctgtaaattggtagtttggtatagaggtttgtgtacattcagggtttttttttttctgtaagtattgatggttctgtaaaaggaaaataaaatcttggggccccaaaattactaagctaaagggaaaattcaagctgggaactgcttagggtaaacctgcctcccatctgttcagagtcgcccctctgctcactgagataaacacatgtctgattccctcatttggaaaggctaatcggaaactcaaaagaatgcaaccatttgtctctcatctatctgtgacctggaagccccctccttgcttcgagttgtcccgcctttccagacggaatcaatctttagcttacatatgttgatcactgtctcatgtccccttaaaatgtataaaaccaagttgtgctctgaccaccaaagttgtgctgagaagtgacaccaaagaacatggtggcataagaactccaaggacccctcccctccacagcggcaatgtgcttgttgaaacaccagtataaaaaaactcgatgagagctgtgattggatttagtgttgatatattttttgtaaattgtggtaaaacatgcatactatataatttaccttctaaccattttttcagtgtacaatttggtggcagtaagcacatttacagtgttgtgtaaccaccgccaatatccatttccagaacattttcatcatcccaaacagaaactgtacccattaaaccataactgcccattctccctacccccagcccctggtaatctctattctattttctgtttctatgaatttgcttattctagctactttatataagtaaaatatcatatttgtttttatttctggcttatttcacttatagtgttttcaaggctcatccaattagaatttcattcacttttaaggctgaataatattccatgcttatgtgcaccgtgggttgtttatccagtcatcctctgatggacactcggttgcttccaccttttggatattgggtatagtgctgctatgggcctgagtgtacacatatctgggtgagttcctgctttcagttcttttgggtatgcccaaaagtggaattgttggctcatatagtaattctatttttactttcttgaggaatcactattctgttttccatggtggctgcaccactgtatactctcaccagcagtgtacaagtgttccagtttctccatatcttcaccaacacttggcctagtgaagtttaccatatttttatgtccttattggcattccttttttttttttttttgtgaaacagagtcttgctctgttgccaggctggagtgcagtggcacaatctcggctcgctgtaacctccacttcccaggttcaagtgattctcctacctcagcctcctgagtagctgggactacaggtacctgccaccatgcccaactaatatttgtatttttttggtacagacggggtttcaccatgttggccgggatggtcttgatctcttgacctcgtgatccgcccacctcggcctcccaaagtactgggattacaggcatgaaccaccatgcctgaccagcattccttatttttatgtccttattgtatatcttctttggagaattgtctattcatgtctttttcttatttttgaatgagattgttttgctattgttgaattgtagttctttacatattctggatattaattctttatcagatatgtgattggcaaatatttcctcctagtctgtgcattttcttttgattctcttaatagtgtcctttgatgcaaaaaagtttttaaattttgatgcattctaatttgtcatttttcttatattacttgtactattggtcaccagccaagaaaccactaccaattctaatgtccataagattttcctcagtattttcttgagggttttacaggttcaattcttaagattagttctttgagtcattctgacttaatttttgaaaagggtgtaatggaaggacatgaattttttccagcatcattcttttgcatgttgatatccaggtttccagcaccatttgttgatgcaccatctgttgcagtggggctgacacatttgtaagatgcagtgagcattaatacatgggagcaccatgcatttatttacctgtctttacttcacagttgttttgagaaggctttcactgacagactcaacagaaatgaatatatatgacttcttataaaatcatattcaagtaaaattataaattttaaaatgttaagactggagcaagactggaacatcactagacaagctgaaacataggctgaaatgaagggttatgtttaccttgctacaaattctgttggcccacaatctcttatgcttattgcttaagagagccacagagtggggtgatagctcacataaccagtccctggttttctgcttcagaaagaagtttaaatattctgcttagacagagtaaggaaattaactgaaagatgtctaatgtgaagttggcatctacaaagtgaaggagtgagtagtaagtgtaaacatcaggaatcccaggagattctatctttttgcacggaaatggcctcactatgcactgctgaagggagaaggtcccttcaggggaccttcatgatgaagaagaacacaatatgatataggaattttctgctgcagccctaaactgaattgtccttctctctaactacaggtctcacaaagttttatagcttcaatgatttcacctgggccaagattttgttttttttgatgttatttgtttgaactgctgcctggggcttagaaaagtgacttggatattttgtcaaaatggattttctttgatggaatgtgaaatccgtaaacactctgctttcctgctgtatccccagagcaggttgagtaccttgcacttcttctcagcacttcgctagaagtggtagaagatttggagttagggcctccctcaatccctaccctttctttaattcagaggatcacaaactgttgggagaagagtggtatcttgggcctctagctgatctgatgaatattaatatccaatgtcctgtagtgaagtcatgtgtgcgtgtaacatcacttcttcacgcagtgtcataggaaagtgggttcctggaccccaggttaagagcctaagcactaaaggcacagagctagagctctaggaggggagggatggctggggtggaacctcgtcttgtcatttagtcctggggccttttcactccttacatggtgggtggtgggcgtctggcaggtgccgatgttgatggagtcaagggagggaactagccgggacagggaaaaacagggttggagagataattaaggtggacattattttttctgagcgtaagtcgtggctggaaatctggagagcctgaaagagtatccccctacccaaacctgttttttccttttccctcaagcctcatttggccacaggcccagtgtcaacaccagggggcgccacagaccatgaaggcgcccacagaccatgaaggcaccgtgcagctgggattgtttgtggtcggctactgggtccctgacttaaccaggggagccaagaccctgtagccaagtggcctggattcaacctgcagctcaggtcttactgacacttctccccctggtgcctcagtttcttaatctgtgaaatggtgaggacattacagcatttacctctggggcgggtttctcaacagcagcactattaacaatttgggacagagaatcttgtggagtggtctgtcctgtgcattgtgggaggtttgccagcaacaccccactcaccccctcccaccaatccccatgtgacaaccgaaaatgtcccaggatttttaggtctcccttgggtctagaagctgcacttaggcattttcccacctgacacttgagttcatctctgctttggtccacataaggccactttaaaaaaatgttgtttctttaaagattctaaccatcttttaaacaaatccattttcttcctctatttctgcattcagttaatccttccaaaccctttgtttagtatatcttgaaatgtatcaattcctgttctagtaattaacatatgtgacttgcatgatatctgctatgacccctagtagagctctgattcctttagcacagggaatgtgttctcgattctgctctggatgatgtaaatcaatttattttactttacttgtctgggatgttgctcctcatctgtaagatgtaaatgtggatatggcttggattactaagtggttttatttcttaattcacctgacatttgttgtgtacctgctgcaagtcaaatacatggcatggtattgtttccttgttcacaccacagcaaatgagaaaatgagacattatagccaggtgtggcggcacaggcttgtggtcctagctactcggaaggctgaggcaggagaattgctccagcccaggagtttgaggttacagtaaggtatgatatcaccattgcatttcaacctgggcaacagaccctgtctctgaaaaaagggaaaaagaccttgtgagctgtctacgtgtactctatgtctcaggagactcatatcctgtaatttttctaaatggcgtctccatgtggtctttcatgaatgtttgtctggtattctctatccttttactttcaacttttctttaccttctactgaaattatgtcttttgtaaacagcccatgattatttatttagttatttatttttacccccctgcactatttgtcttgtaattggagtgtctgagtccattatgtttaatgtaattattgacctcattgggtttaagtctgtccattgtcatttgctgccttctaatattatctctttcttgctcaactatttttcttatgttaccttctttagatgaataaaaacctttgcattattgtagtcttctaagtgtcctaattacacattctcttattatttctttaattatctgagaaagcataatgatctgtgacttattataaccaatagcagaccacaacttccctgactttcacctacctgtgcccacagcccaggggagaatcagtgctctggctctgagacacaggggtggtgggagtaggagagtgattggatgatgaatctgtagctgcagaggcatctgggcccctcacctgcattcctcatagatgtctcctccattgaatgcctgcgatgccctctcctctgtgtactcctgccagagtctccctatctccactgacagcagctccacccttctgctcactcagtccaatactgtgggtgtccttgattcttcttctcacatccattagcaagtgctgtgagtccatcttcaaattcatccagaatcccttcacttctcactatttcccctgctcacaccctagtcaaggtaagcaacgtgtccatcctagaatactgtactcctttcccaccattttccccactgcatcactggttccccacctctcaattctgttctcagcacagcagccagaaagaagctttcaaaggatgagccctaccatgtcccacttttcaaaactgtcctccccatgtcattcagagcaaaggtcaacacccttcccacacccttcagggctacctgctctagccacacctttgacctcacttcagtttctctgtgtccagcccttctggcctcttcctccttccaggaacacagacaatttcctgccctagtgcatctgcactgaaggttcccctgcctgaaaagaactttcccagacatccttgtagacaactcctcacatccctcaaatctttactccaaggtcacatttgcaacaaggcccatgctgaccacccagcacaacagccaccttcctgtccccacagcccaccctctggatcacctgccacacagcacttgccaccttctaactcaagcattttctgttcctactctgcttatactatatctatcatctgcctacagaggtgtccaattttttggcttccctgggccagttgggaagaataagcattgtcttgagccacacataaaatacactaatgacagctgatgagcagaaagaatagaaaaaagaaaaacatgtgcgtgcataattttcatgatatttgctaccacagataagcaaaaaaacttcttacattcaaagctgtcccgggccacacgcagcccgagagctgcaggttggacaagcttgcatctagaacgtatacaccacaaggccagaaatttttctgtttttactttaatgatgttttctaaatgcagaaacagtcatatacctagcagacaacaaatgtcagttgaatgaatgatcactgtagagcacctctgtattctaaaggcaatatctttattaacgtagctaaagaacaacatcatctcacaccaacatcagtgctgccagtgcttttctcaccagggctgcttgtgtgtccttcccacctcctcccacaccaaccctcctgcacactgcagcgcacagccatatttttctgttcaggaaagataatcctagccttgtgggtccaattttccaaccccatataaatctaaatcagactctgctttataaatgcatgagtttggattggagccagcactgggattactacaactcaggcaggaagaagagtaggaaagcagaagaggagttccaacagaaagttacctacgatgagaaactatgggacccctcctctctgcaaatttcagaatctgcttcctttaagaaggctggggaaaaagatggaaaatacaatccaggaaagagacctggaaggagggcaaaagatacaggggactgaaaatttgtctcttcataccggaaggacttcgatgtgtagggaccaccctaggtgacatccaagtccctgtgatcacaggtcctggtgggacaaggttctactgaagggccaaggacagtggagcagcaaagatgacccaggtgagctgtgaccacataaagcccatggtggcctgagcacacactgggcacagccccatctactctcctcccctgcaacaaatcagcacaagaaacacgtggactctggaaggttctcatgtcttccatttattttgtctctcaaattttaggaatcttctcctttaattaacccatcaacccgtcatggaaataatttgaaaaaagtaaatttatactcagattctaattttaatagggaagtaagaagttacagctcagtgcaccatgaagttgagacagagatggagacatcccagcaccacttctctggaacaggaaaggtgatcggggaaggaatgtaggtcagtgtggggaacagggtcatggtggacacgggtgtgggctggtctccccaccacctcacattatgcctatagggacacagacacattcagatgcctttgcagaaagagaagtcagggttcttgaagtcacaaagggaaggcatgaacaaatcttgcctctcagtcccacacaaggcagctgtctcacactatagaaaaaatattcatgaacaaattcatatcactcacagtgaggggtcacaccttcaacagcccatcatgtgctgaatacatccaagtcaaagaaaccccatagcacagctatatccactgttaccccaacaacccacacacatcagcctccccagggtctcacctttacaagccgtgagagacacatcagagccctgggcactttggctgcctggggtagaacaaaaacagaacctggtcagatcccacaggagatgtggctagaggaggaattgtggggtgggtgagctcccccatgggctcccaaccacaatatcccaaggatctcagggatcagcctccttcatacttacttgcagcctgagagtagctccctccttttctatctgcgggaagaaaacgtcctgtgagaggccaggaaggtagcagggccatgaggtcctagaggaacctcctagtcttggaacctcgagaagtttccagaaatgtgtgactgcaaaccaagggcaggatcaggaaaaacaaggaaagcagatgtgggtcctggaccaactgccctcctaaggtctgtcctcagcagggaccttcccctgacctgtgattactggggtcagatccccatcactacaatcatcaaggtgagaaatctgtccttcattgtcacaggtgcttacaaaagagtaagtgctggcacacagggcccaggctgggtaggcccatgaatgtggatggtgcttcccggtaaccaggcagaacacatttctacctggagcttgaaacccccagtgggacaagaaaactcaaacccgactcctcaccccttccccacctgagctcttcttcctccacatcacagcagtgaccacagctccagtgaccacagctccaaggagaaccaggccagcaatgatacccacaatggggatggtgggctggggagagggctctgggaaaggaggggaatgtgagggttctgacctccaggacccagccccgaccctgctaaaggtctccagaggggctcctgctttccctaagagacatggccgcccccatctctctccttaccccatctcaggatgaggggcttgggcagccccttgtgctgcacatggcatgtgtatctctgttcctctccagaaggcactaccacaaccgcccacttctggaaggttccatcccctgtgggcctggtctccacgagctccatgtcctgggtctggtcctccccatcccgctgccaggtcaatgtgatctccgcagggtagaagcccagaacccaggacctcgttatgcctcatgttcagagaggggggtgggtcacgtgtgtcttggggggggtctgaaaggaagagtcggaaaactcaggcactttgcattcctcatgggacaccccagcagcgcccatgtgaccatcctgatgaataggacacctggggtggggaagggagcacagagcccagacaccagcctggacacaggcgcctgggataatctcctattccttggaaagttctagtctctgagcagggtagcagggacttctggtcctgatctgagtggaggccaagggactcagaggagctggagtcagactccgacacattgagtgtgaggcagagaacaaggcccgggaggaaaagtcctggtgcccaaggttgctgtggggtgaaaggggaccgcggatcagtcttccagggattgtcttcccctccactccctcagagacttcatcccttaattgtcccaggaagagcagggtgggccctcagagtcaatctctgatacaggatctggaaacccaggaggattcctctccgtcaggacaggagggagggcgatattctggtggtgtttccattttcttcccctccttgtgcgaggccagcccgggagatctacaggagatcgagcaggctccccatggcccctggtacccgcgcgctgcagcgtctccttcccgttctccaggtgtctgcggagccactccatgcaggtgccctccaggtaggctctcctttgctcagccacattggccgcctcatacttgcgctgggtaatctgagccgcggtatccgcggcggtccaggagcgcaggtcctcgttcagggcgatgtaatccttgccgtcgtaggcatactgctcatacccgcggaggagacgcccgtcgggccccaggtcgcagccaaacattccctggaggatgtgataccctggcccagttcccgcggtcagccccgcccaccgagccctggcccggcccctagcaacctgcggagattttggcctcaactgaagatgaaaccaggtaaaggcgcctggggctctcccgggtcgaggatctctgcaggtcccgcagcctcggggtcgatcttggacccggagactcaggggaccagggccgtccgtgaggcatggagcggggagtaagtgatctgcgccccgggccggggtcactcacccgcctcgctctggttgtagtagcggagcagggtccgcaggttcactcggtcagtctgtgcctgggccttggcgcccagtgtctgtaggtcccaatactccggcccctcctgctccacccaccgcgcccgcgtcttcatcctcagactcacggcgtcactgtcgacccgcacgaactgcgtgtcgtccacgtagcccacggcaatgaagctgggctccccgcggcccggccaggaaacggcggtgctgaaatacctcatggagtgggagcctgggggcgaggaggggctgagacccgcccgaccctcctcccggcgcggctccccgggtcctgcgccccagccaggtggacctttcgctcctcacggcagaggccgtttccctcctgaccccgcactcacccgcccaggtctcggccagggccagggtccccgagagcagcaggaggagggttcggggcgccatgaccccatcgtcggcgtctggggagactccgagtcccggtgggtgcgtggggactttagaaccggggccgcgcgacgctgattggcttccctagaaacccgacactcagtgggagtgagaactgggtccgcgtcgtgagtgtccaggaagaaggacccgtcgcaggctgggagagggagaagagaaactctgcggagatggggaatccccaatgctgcacctccccagcccatgcaccgccttcggggcctgagaccctgagagccatgcctggggctctgggacttcgccctgaccccgctcctcctgtgacaaacgctctgtctcaatgttccctgagtcttggtccaggagctgtccgagaaaccaggaagaaaccctcagcttgggccccgtccctctcctttcacttttcatccgggaattcctgtccctgaaatggactccctgcttccccactgcttacctgttcccctggactcttcaaaaagaaaactcaccccagggagcttggtgccagagagggagctctccctgggaatggaggtgtagagacagaggtttttttcttttatttcttttttctttttctttaaatctggaaaagttgtgcctgggtgcatgagatagtatagagaccagtttgctttttgtgtattaactacagtgggtagcagaatcttggtaacccctgaatgatcaggaatctaatcggtaaaaacatgtgactttggccccttgatatataaagtgtctaaaagcattacaacaggactcacaaagctcctaagtttcacttttgcaaacaaggtatctgtgactcccgcttgtggtgttttaaatttacctttattccatagccctgagtttctgtgagtccaggacatctcctcaatacaaagtagccactgtgttcctatgtgttgcaaccaggagtcagtacagacttcattcacctcaaagttgcaagcgctcgatgcagtcacaatgtccatcaccagtgctcatgcactgcctgtttttaggaagtatccacatctaagtggtgtgtatatttcttaggaacacttagtatttttaaaacctgattaacataaaaacaattagtttttaagcagacccacttaaggtattaaaggccaactgcaagtaacaccctgcgaggctctgtagatggatctattgaaataccattaaaaaaagtgttcaaacctaagagttgtgctgcttttgaattctatccctctactccttttcctcacctactgcttctccagcccttccctccgtccctcttatcactcagcccctcctctccccttagtccccatcacactgtcactcctgaattgtgacactggcactctcccgttacctgctacgtgactgttctctccacagtggtcctgctaatgtgagtcaaagtgtgtcatttctccacctaaaacactccagtggctccaccttggtcttgtgaagcttctagaatgtcaggcacgtgagcatatgaggggatacctggttcattgtagggactaaattaatttttgttgactgaatgaatgaaatatgagtatattaaattgcatcacagataattataaaatgcaaaacactgaaaaagttcagaaagattttattttatgtaactagtgtatatatcaattcatcagttcattccattagtctgttgagcctgtgtatgaattttataagactgtgtaaaaaattatcacaaacattggctttaaacaacacccatttattgtatttatttatttgtttttatttattgtattcatttatttgtttttagagacagagtctctaaaaactgtcatccagcgtgaagtgcagtcacatgatcatggctcactgcagcctcaaactcctgggctcaaggaatcctcctgcctcagtcttcagagtagacaggactgcagacaagtgccaccacacccagctaattaaaaaaaaaagtgtagagacgagtgtctcactgtattacctgggctggtctcacactcctggctgcaagtgatcctcctgtgtcaactcctcaaatgttaggattacaggagtgcaccaccacgcctggccaaaaaacacccatttatctgtttatagtaccttagtcagaaatctgggcatgatgtagatggaatctctgttccaggcttcccaaatctgagtcttcattttgaatcctcctttaggcttatacagaggtggcagaatgtgctttcttgcagttttaagactgaggtccctgttccttgctggctgtcaatgtagagaacagggagggctgtactcaattcctggtgcccaccagtgttgtttcctacacagccccttcattttcaaagcccacagtggaggaaacccctcatgctgaatccctctcacactgtgaatctctatgctcaggaagaacccagtcctttcaaggactctcctgattaggacagtccaagcagcataaacccagcctgaagtcaactaattgagcccctttattatgtctgctaaattccttcacagcagcacctacattagagttggttgaataactgggggaaggtgaatgaccaggaggtggttgttggggccatcatagaatcactctagcaagggatgaatcttccttttgtgtttaattgggacacagttggaaattgaagttcaagtaaagtgatcattgtgaacgataataaaatacatcctcttcagccatggaacttctcctttccttttaaaactaagttacatgtttaatgtcttataattaagttaggcaggggtggtggctcacgcctgccatcctagcactatggaaggcagaggaaggcagacttgttgactccagaagttcaagatcagcctgggcaacatggtgaaactctcatctctacaaaaaaactagaaaattagcctggcatggtggttcatgactatagtcccagctactcaggaggctaaggtcagaggatcccttgagcccaggaggtcaacactgcagtgcatggtgatcatgccactgcactccagcctgggtgacagagtgagaccctgtctcaaaaataataataatgatgatgataaatttagagcaaatgcaaattaacatgtaataatgcatcctgtcttgtgaaaatgtattagttatttactatgcataacaaattatgtaaaacttagcagctcagaacaacaaatattcctcatctcccacagtttccaatgatcagaaatccaggagaggtttccctgagtgcttctggctcagggcctctcacaaggttgcagtccagttgtcagcctaggcctgcatcatctgaggacttcactgagcaaggccatagaggagccctcgagctacaattggccatcagaggagtcccctgtctcctaggaatgtcctgccttagtgtcactggtatgacccatcagtcgttgggaacagcccatgggaagcagggcctcagcaccaatgtactgaggatgtcagaacacaagagcagggccttgggagattgcccacaagtgtgactcaaaccttctgccctgacgggtctgggcccttggaaatcaaatcctctcaggctgaattgctggatgattctgctcacacttacaatggggcaagggaaaccagaaggctcccaggtggatctctggtttccacacacacttctacccttgtgtgaaacagccatgccttctcctggggatgaggatctatttattacctgggcctggagaggaggagaatcttcttctcaccaagtggtatctgggcacacactgtccaaacttctctggtgactaaagtaatgtgtagttcagtgggctgtcttttgtctccttttaggggtacactcctttggaaaccagaacctcgtatcctgcacagcccagtgttgggagataaaatatgcgaaataccccattgagtgaatctaagagattggacatggagccaaacctgcttccgccttttgatttctggacacacatgttcttcctattgagaacacagaactctagagacgtctctgattcaaacaatgcactgtgtcctgaaagatggcacccacccctcagagtgcttcctccaggctggcactgagttgtgcctgtagaagacctgtccagccttccttgtggctggcagctcctgggtagtgcagatggtgataggattagtggaacccacagccgtggaaacactgaaactttccctgcaaagtgggtccttcaggcagataatgggctaggagcactgcctagcctgcagaccaggaatgtcaacagcacccagagagtggtgctggctgtgtctgagagcaggacaggaaaacccacccatagaatcggtacctaaccctgtgaagatgaaactctggcccttccaggttggaagtagctaaatgtagtcaacttgttacttagtgggtagtcatgtaaagaaatagtgccccactagggcacatcatgggcctcaattgctgatgagttggacattcagaggtggcagcagctggatctgccttggtgtggggaagtcagtgctgctggccccttacggagcctcatgcctgccactgtggttgctccattcatgcactcatcctaccaggcgtgggctgacccatggtgaaagctggctaactgccatttgtctgtttggtagttcagtgccacttcagacttgggtgttttctgtgggtgtcagcaagggattcaagctcaacccaggtggactgttttcacctgatgatgaatgctgttgggcctgtaccatctatgactttgtgggtcacacaggcacttggaaccccgtagttgcttggtatcccgtggtcaaacattctattgaatcaggacaaggaacactaaaagttgcttctaacagggggcatgtgtctctgctgtggatgacatgatcttactccagaatcccaggccctccactgtgactctcccactggtgcttggttcagctccatcctgtgtctttccccaccactggcaccaccagccccaggggtctgagggatggtggctgcttgtaccatggcctggatctgctgcagggtcctttcctgtgtaggccccacttgaagctggcatcctcctatgtcacctagactgtgggccaaagcaaaatgtctagatgtggaatgtggtgttgttataattcaaagaggctcaccaagcagtgtgcttccttgcttctggtgaggatgcaagatgcaacagtttttcttttaccttggaggggacacacctgcattcccctaaacacttggcacttgttcacccataaaacttcacttcagtgcccacctttgaagctgtataaggtttatcttcaccttgtggggtgcgtgtgttttgcaaaggactacagtgcactttcttcctgctgctcatctactccagtcaacatgaagttgtcaatgaaatgtgctgatttaatatcctaaaggatatgcagtatgtccagtacagtcttaagcctatactatagagggcacaggtgttacaatagccctgaggcaaacaataaataaatgtgtcgttgattccacatgaatgtgaatcactccatatcctcttccttccttccttccttccttccttcctttcttttttgacaaagtcttgctcttgtcccctaggctggagtgcaatggcgtgatctcggctcactgcaacctctgccttctgtgttcaagtgattctcctgccttggccccccgagtagctgggattacaggcacctgacatgatgcctggctaatttttgtatttttaatagagacggggttttgccatgttggccaggatggtctagaactcctgacctcaggtaatccaccggcctcggcctcccaaagctgggattacaggcatgagctactgcgcccagcccatatccactttctaattggagtggaaaggaatgcactcaccaaatccacagcggcacactgtgtgcccggggctttattaacctgctctaccagtgataaccagacaacataaaagctgcaattataactcctacttggccagacctggagtaatctcattcattctttagaccttaccagtttccctcagggacaggttgctggattacatagagacaatagacagccccaacaccaccccacatccttcagctctctaatgttggtgcgaccccataatactttcagtgtcttccacaagacccaccctgggacacactatggtttttgatttggccaggatgtgggcagtgtcagaggtttccgtttggctttcagcacaatgagagtccttactccacagactagggacccagtgtgggggtgactccacttagcagtgcagcagtgtcaatcatgcactcagggaattgaaagatatccagcgttgggtctgttggcccagtggtcccattgtgggccataatttgtccaggtttactccctggcctccataagccccactgtgatgggagacatgagtgctgtgggcatctgggcatcaatgtcagctcacacccagtgtcaataatccctccagttctgcgtgtttcctttccccagtgtacaaccacccaagtaaatgtctataggttcctttgccaaatgattgagggaattgtgccagcatatacttccacagggttgcagggtcttcctcctagggatatggactcctcctctgtcactgagatctgaatctgaatcttggctgaggtctaggcattgaggatgggatcatgactttgtattgggtcaaacaccttcaccctcctgctcctcaattctttcattcctatcatagatatcaagcagcgcccttgttggctgcctgtcctaaccctgggacaccaccctctattaaccttccccacattccctgcaacttgagtcctcctggctgctactctgaagttgccatagtaaccatgccctctgctttttcaggtcactgccaccacttcttctctgtctcttcagggccacactctccccagggatatggataaatgcaactctgggaccatctttattaccatcacccgcagcctgcagaggacaacacccctatacttagtgatgcaggtccctttcaccatcatgttcctgaggctctggtggaaggttgtgtcctctgggccctcttgtggagcatggccctggtgggccttcaccatgcccacttccctcagcctcgttattccttcctttacatgttccagggcaactaagacatgtctaccttgttgagagttgggcatctttttttccaatctatatggattcaccccagcggtgggtttagctccacttatcaaagtcctggggtgtttgacaaacccatgccttgagaaagtgcctccaagccaaaggatttttattcatccagcctgaaattctggtttcttgatcaaacgccctcaaattccaatcccagaagtgctccttgggctcctgtggggaaatggcggctaattcctgcaaagctgctgagtaggattcccgcagaatcacgggggtgaggcttttgcagcatcttccagcgtaggaagtgggaaccattattagataatggtgagcctcctctgcattcccagagggtcctggagggcacccatcggatatcctggttccagtttccagaatctcaggtttccccaccaggaccctgactttcctgtaacaggcctgctttggctgagtgtcagacatgtctggagcactgtggccctcgtaatgatgtcttcagctgccattccacgctatctgccctttcgctacaggagataaaggcctctccatgagacactgcagaggctgtcacctgtagccagtgacagctgttaacaacccgcagattctcatgatccttttatagggtatcaacgcagccaagcagtaaccacccaactcctctgtctttgtaggtttcccccaacctcatcattattgtgtagggcattctatcacctcacctgccatagcttcccctaaccagggcatcttctcagctcagcactgaggagaccacagcacctcagctgcaccttatgccatggactttctgtgtcccccaccaacccgggtggcatcctcttggcctgccaggcagtgggcaagattatttcaaattcccatttttgcctgttttcatgggtcacccttcataccgcttgggttagttagggtcccctgaggagcagagcccaatacggtagtaaatgtgcaaggatttattcagggaaatacttgtgagagaaattcaggagagagacagaaaacactgggagagccatcagaccacactgcaactctgagccccagtgaaggagagagggcaggaagttcagctggaagcatcctagaccctgtgcaggctaagggaaatttagtaaaggaggcagggagccctggggctgcagtcagccttcagaggagaaatactcctgccttagtttctgccctgctttcctcaatcattggctggaaaagatcagggggcaggtgtgggatcagagcaaatgtggcaatagatttcaagcttcaagagctggggtcatcatcgattctgcttcctgtagctgaggggctgggatgtgcattctcatgactgccacaatgatccagtggggagagagggaaaaagttgatgataaagataaaaaaagatactagttgatgaactgacaactttaagtagatgagaagggatgatgtttggggcaccagaagagggactggctctgactgggagcagaattgttaacccccagcaatccctcccgtggtaaaatgcctgacatgtggtgcagctgcaaatgcatgagcagacagtggtggaatcggggaagttgtcttctaatgtgttcagttttctcagtgaggtaggaggcaaggttgtcagctgaggtaagaatggggaagaagggttggatgtgtgagcacagagagaaggtgtctaggagtcacccaggccaagaggaggctgagggtgaaccacgtagggagagggtgattgctggccacgtcaatggtaggggctccccatgaggtttggaatcttaaagagaccagtcagcatgttgtgtgctgctgtccagcctcctgcagctcatggggcaggtgcagcatagacagaggtggaacccaccagctgtgtagttttgccaggtgagtatgacaatgcaagggagaggcaagggagggattgaaattatttactgtagaattcaaaatgggagaagagggaggagaggacaccaagggtgagtgacagggagtagatggcaggatcactcaattgggaatcccagtgggctggaaggattgttggaattgatgtaccacagggtggactccaagcctggaatgcaggcacataggaaatgagtggttcattgatattacatcacagcatatgataaaatgatagtgtctgtgtcatcagagcctgtggccaccttgcaaggggatgagtggaaagatggccagagagtgggaagtgtgagattgagagtatggaagggctggggttcttggccgtgatgaggcctaggggatgacaagggcatgagattcaggcagagagaggagaaggtcatggaggagaggagttacaggatctgagagtccagggagcaagggcatcttctctgctgtataggtgtctgttgctgccataaaaattaccacaaaccaagtggctttaaacagcacctaattatcatgtcacagtcatgtgggttgcaagtccacacagtctcatggggctaagatcaatgtacgggaaggcctgcattccttcctggagactggggaagaatccacttccaagctcattcaagttcttgtctgaattcacttccttgcagatagaacagagatttccacttccttgttaagagccacccttagctcctagagttttctctcaggtactcacacatggcgcctaaggcacatccagtcctcctgcttggaacgtctgacctcctctctccagcttctcctctgtttcctcttctgcagaatctgactccagccagggcagtttctctgcttttaatggctcatgtgatttgattgggcccacgcagatagtccaggatactctccctattttaaggtccttaatcttcattacatgattaatgtcccttttgccatgcaatgcaacctattcacatgttccaacgattaagcctggacatctttggggaccattactcagcccaccacatctgcgtatgttgaagtcaccaagagtcaaggagacgcactgctggagagggtgacagtgaaccaggagctacaagggtcaggattaagaggaatggcttggggcacaaagggaatggctacaacatggggaatggggccctaatctgctgacagcttaggggtttagggaggagggagggagaaaggtgtgagaaccacagtgaggagcaaggaccccacctcacctctgaacccaggggtacaagtccctgggaaaactcccccatgtgggaggactttggagggggtcgtgtcctcagggagaccaggttgctgctgtagctgtgaggtgcaggaacatcctgagagagggtgtggaggttttgctaatctttttgctgggggagggtcttgcctcagtgttgactattggctgatcaggagggtggttgctaaaggctgctgtggcaacttctttagatatgacaataaagtttgtggcatggattgtaaatcggaatcagtacttaagtaaggtcaatatgagttttcaagtcaggtggacctgaatatgaaccctccaggcccttccaccagctagctatagagccctgggcacatctggcccacagttggccctgacagacacttgcccagtgagtgagtgctgaatgagcccatacgagtcagtttcctcatctgcaaactagtgatgtaattcctgccttgccaattcagaagaataagtgagaagaaacccagtgccaagaaaaacagacacaagacctgtggaaggctgggcaccagtgctctaaagcaagctctgcctaaactggcaggatcatttttcacatcagaaacaggaattggtctggattctgtctgggaccaggctgagagggaggtggaggcagcagagcagggcaggggtggggcctatgcagcaccaggtgctgaagcaaagccaaggcctggagggagcgaactcttggtgtcttctaggcaactcagactgctccctgcctcagctaccatggtcctttctcttccaggatctctcggtgctgttgtcttcacctcctcctgccctcctggtccctagctctccaggactcacaaagatgctgctctgaaaaccccaaggcaagcgtggaagagtagaacagctccagggacagtgggaagatgaggtcaccccagcatgttgacggacaccaagggtgggggtggaggacgtgaaggggatcagcacaggagtcaggggaaatcctctaaatcccaccctgcaccaccctcacccctgcagctccttgcctagttccagctctgagctctcagctccttcccaaccacaccccagctcagacctcagggctctctctccccaccccctccagagcagcacagtccacagagcccttgaacagaaattccccctcatctaacagttaattatttcttagcggagagggacagccggtcctctctttccagtgaccccatatccttgttcaaggtatccagttatactccctgagccagggatctctatttgccccccagaggcctatgcccaagacaaggggctccctgggcttctcagtacaggaggccttaagctaatgggctagaaaaagggaaagggaggtagaattcctcatttacagccagaccctgcaatacaggttccaagggcctcagccccctgccctggctgatgctccctccaccactccccctcaccagggccatgagcccccaacacagctgagctggcccaagctgaggagttgctggagctggaccaggccctgctggaagggcaggagggggtcaggggcccaggccctggtgctcaaggtctagaatttgaaggaatagatgaggaggcaccaagaaagcctgggtggagacactcaagcttcccaccagtgcccacagcaccctccatccctggaaatactgcgcaccatccaccaggagccccaggatcagaaacatcccagcctctctcaggccagataaagcagaagagaccccaacaaagggccggaaataggcaggtagttggggagccagggctctgcagtccgtccccctttgacctcacagcagggcatccaggccttacaggaatttaccctggaccatgccctaaaataatcttaccccaaatacaataaagggagagagcacccacacataatgcagatgcacttgtgtttcatgtttagttacattaaaaattctgacgatcaggaatgatggttcgggagtggtgctgatgcagaagaggaaagccagggggtggtggaggctgtcaggtgtgggggcagcagggtctccttcacccacaccctgctgtcctctcctgaagggcagatggtcacattccagaatgagcgagtctcctactgcatctgttcaactgagaaggagacatggcacagtgagaataaggcatgaaaggacaaagcaaggcaggaacacacaacacacatgcagatgctggtgtactgcctgggttcagaggatggacttgggcgtggtggaagagatgtaatatgagaaaaggcacagaccccacagagagggcagcaaaacgtcccaacacagcatcaacggccagggggcatgaagcagtcaattgttcattatgcgttaagtgcccatgacctacatgatgggattgaagacacagtaaggaatagggaggaactaagggtttcatgaaatcagcactcactgtggaggagacgtctgtctcagcaggtagctcctaacactgaacttaaagtgatgctgcccatcactgaggatcctggcacaattctcatccgacacaagccctgttccaaaccagcctgctctagtcacctggaaggagacagaggttaggactagaagaccccaaagagggaagacagccagagggaggaatgaagaagtgaagtgtgaaaagatacagaaaataagtgggtgggagagtgggtgtccctctgtgtatggagcttacctgattcacgtaggtctcagaatcttcaggcatgtcacaggtaaaggcagtgttcacctgctccatgtccatgcctgggcaaaatagggttggtagccaaagaattggcctttaaaaatcttttggggtcattctcagacaagtacagaagagcaaaaactgttagtcacctgaggtgcattctccttctcaggttcagaaatgaactacatgtaaaaggaaccaaaggctgtaattctcatggcacccagaaaactggactagggacctggagagtcatgtgcctgtcattgctccaccactcacgagctgtgtgacttcaggagaagctctctactcatagggcctctgattcatctgtgaatcatggacaaatgcctccattctagcaaccttactgaaatgcagggaggaccaagtgatcaatgcggaggaaaaaagcaaagtgatgacatttactcctagacaagactctttaggaaaatgcactttaaaaggaggagaaaacatagtacctgccatcccctgccaaaaagcctctttggtttagtaattatgattgttcatcatctttctataaaattagggcaaaactagctcactcaatgtctcaaataaattaaacacagtttgtgattctatgtccacaacttttgcactgtgtgaaactgaaaagaaatgggaacacatccatgtttgtgtggtggccaggagacccacaaaggcttggaaatgaccctgtatcatctattttccattgactcactctatgttttggaatcccaggtaattcatattcttaaaaagtctcatgttcatacataggacagagtagaaaaggtaatatttctgttttaatttgctagggctaccataacaaagtaccacatgctgggtgagtaaaataataaatatgtattgtctcacagttctggaggctacaggtgcaggtcaaggtgctgcagggttgctttttcctgaggcctctctccttggcttgtagatggccacttctgtcttctcaacataggactccaacatatgaatttcggttggggagggacacaattcgtctcataacagcgtggatcatccttggtagtggatattctaaaaaataaaagagagtatatccctttggcttggtgctttctcttggttttctcaatttttggtcttgcaataagaacaaaaaagaacaagaaccaacgtttagtttttcccagaaggtgaaccctccctacatctgggtaaccccagaccccaagaagaggtgctatgcagttctccagagtcttactttctccaggaattctgtttctgcctttctaactggggagaagattctctcaggagagccacttcttctgatgctgtatgggcttcattctgcttgaacttacaaagtggatcttaataaaaaggaaatatttgccaatttttatcatggtcatatttttgtactttttaaaatgtcccatattgtgttgagtttattttaaaaatattttttaaaggtaatacataacattttatatgtttatggggcacatgtgatcatttgatacatacacagaatgtggaataatcaagtcagggtgtttagggaatccatcacctcaagcatgtatcatttccttgtgttgggaacatttaaaatccactcttctagctgttttaaatatacataattgttagctttagttggcctgctgtgctatagaacattagaacttttttttttatataactgtacatttgtacccattaatctacctctctacatcttcccacccctacattcttcccaacctctggtaattttcattctactctcaacctccatgagattaacgtctttagctcacacatgtgagtgacaacatgtgatatttgtgtttccttgcctggctcatttcacctaacatgacctctggttccatccatgttgctgcaactgacaggatttcactctttttttatggctgaattgcattccattgtgtatatactacagttactttattcattcacccattgataaattcaccattgatttcacatctttgctattgtgaatagtgcttcaataaacatgggtgtgcaggtactcttttgatatattgacttcatttcctttggataaatactcagaagtagaattgttgcatcagatagtagttctattaatagtttcagtttttttgagagatcactctactgtttcccataatggctgcactaatttacatgaccaccaacagtgtataacattcccctttctccacatgctcaccaacatctattattttttattttttaataatagccatcttaactagggttagggtaagatatatctcattgtagtttgattttcattttcctggtatttagtgatgttgggtgtttttcacacacctgctggccacttgtatgcctcctcttggggaatgtctattcagatcctttgtccactttttaattggattatttgtattttttactgccaagtttttgagttccttgtatattctagatattagtctagaatatactaattggatgaatatactggttggttgaatacttagtaaatattttcacgattcaacaggttattgcttcattctgttggatgtttcctttgctgtgcagaagctttttagcttaatatagtctcatttgtctatttttactttttttgcctgtgctttagaggtcttagccataaaatctttgcctagactaatgtttcccataagttttcttctagtagttttacagtattgggtcttacgtttaagtctacaatcccttttgagttgattttttgtatatggtgagagacaggggtctagttacattcttctgcatctggtagcattttcccagcaccatttatttaagagactgttctttccccagtgtatattcttggttcctttgtcagaggaactcctttgagagttctcattaagaagcaatgtttagtttcaccaaatgctttttctgcatctattgagatgataatatggtttatgtccttcattctgttgatgcggtatatgacatattttgattcacatatgtcaaacaatccttgcatcctgggtataaaactcacgtgattatggtgtattgttttgatctgttgttggattttgttgctaatattttcaattactattttttattactaacgtttaaatttttattgtaagcattttaaacttgtaaaatttacatatactgaaatgatcagatctgtatcaaattcatcaatgaattttgacaaatacagccatagcacccatgccactatgaagatacacgaagttctctatttttctgccttcaaattagccccctttccccagcagccattgatctgatgactatcatgatagagtagctcttcctgtttcaaaacttcatacgtatccattcatcccatatggcctcccttgtgcctagctttttgcacttggtgtaatatctatgtggtctgcccagcttgttgcatgtatcagtaattcattcatttttaatgctggtagtattgcattgtatcactgagtcacaatttttttgtacattttgggggtattcacggttttttattgttacaaatgaactatggacattattgtacagggattcttggacataatctttatttcacttgagtaaatacctaggagtggaaatgctagccatagagtactagcttgtttaactttattagatgatataaaagtgattttcagagtggctgttttatattcttataggcagtggatgagactgtttcacatccttgacaacatttatatttattaatcacttaaatttcagccattctaataagtgcttagtggtttctcgctgtggttttactttgcatttttccctgatgactattggccattcatgtgtcttttttgtaatgtttcagaagatttctctaaagattgtggaaggagctaaataaacatgatttctctttctctaagtgctagacctaaagcggaatgtttagaatccatccacgcttcccagtctggcctactcaatcccatatttgccccctaaagtccccactccttcatccctcttttatattttatcctcttcattctggctcaagctcacactcctccaggaagtctgttactgtgaaggtcactgacatgctcagtattgtcatctctccatctgtctgtacctctgtgcagctttcctcacactcaataactcttttcttattttgctcagttcctgtggattcacttcacaaacattaattcaaagtagttccagctggaagaaagaatagaaaattataaaaaatctttgtgaaggcaccacccaggtttgtcaattggcgacattttaatattattggctatatgtagtatacatagaaaaataatagaaatatatgtagatagccttgatttttcacagctctgatatgcacatgtttcagtcagtactgtactgagcaaatcaagaattgcaagaggatgtgtgacttgaatttagtgtatgcctttatatttttactaagttttaggaaatctctttgtttgaagtcttttagacttgtttttttagaacaggtctcctcactctgtcacccaggcttgagtgcagtggcacaaacacagctcactgtacctcaacctcccaggctcaagcgatacacctacctcagccacccaagtagctgggggtatagctatgctccaccatgccgggctaatttttgtatttcttggagagagggtttttgccatgtttcccaggctggtcttgaactcctgaactcaagcgatccacccaccatgacctcccaaagtgctaggattacaagtgtacaccaccttgcctggctttgcttttagacttcttataaattgtttctggctaattttatcattcatttgcttgctttttcagttaacatgttctatgacatgaatctatgttcatacaaatagttcatttgctttcattggtggatagtattccatgggaggaatatactacaattcttctctttccctcttcattgacctttagattttctctattgtagacctcactgcaatgaacatcctgggacattgcctcctgctctcagagatatgtgagtttccctagaatatgcatataggagtggggtcactacagcttttccatatgatgttacatgatgcaaaattgttctctgaaagaaataatccaaatgcctatcaagagggggctgattaaaaagcaccgcactcaaaagaagcaatctctatttttttttaaaatattgcatatatatacaatggtgtatcatgaaaatttcaaacaaagatgtagctaagctcttggtatttcttcatgtgatggtctttgtgatacaatgtgaagggaaaaggcaaggtgcaggaaagcatatgtagtttgctaaaatttgtgtgaaatgggagaaagattatatacatatacatttagattgacttgcatatgcataaaatgcctttgaaagaataagcaagaaactgatataaatagctgcctgtcaagatggggtagcataagagagagacttttaactttttgagttttgagccaagtcaaaacataaaataaaagataattccaaggcagacaaaacaaacaaaatcaaatccttcaaaataaaaaacttaaaaaaagagcctaacagaattaattctcttaccttccttaattaaaaaaaaaactgtctaaaaattatatcacttctcaaacaaggatgtttcctgtcactttaattcagtatgttgttttctttttcattgcactatctttctttatgtgtgtgtctgtctttcattcattaaaagtcaaaatgagagcatggttacttaacaaatgcaaccggtttggtgaaggaaattttgaccaaatcctgatgtaaatggtgaagcccaatctacaaggaattctacggggtccaatgtaccaattgtggcttcagcaggctcagaacttcctctactgtccatgtgagctcaagtatgtgatatttagaaaagagaacacttggtaattctcctggaaaacacacgattgaatccatttgctgaatttggaaggttctcattatgagcccattctaagtatgtgtcatatgaggtcaccctgtatttggatcagaaggtatagtcagagctcacatcccaggcccaaacagcccaggacagcagagcaagactcgtaggtcagtttcataaggggtgggaaggattgggggtgtgggggccacttgtgaagtagtgggaaccccagatgctgtgtgaagctcagcctctggattgccctgtaaccccacatttgattccttcctgggtgtctgccattcccgggatcccaaggaaatcaaatgctgcagacttgggtggggtgctctccaagatggcccatgcatggtctagtttatcctatacctttgcctgtcagccctcttctgatattagaaatcaatatggattgccttagggtggtgattctcaaagtgtgttcctgggacaagtagcattggcatcacctgaggacttgttagaaatgcaattttcaggccctgcctcagacctactgaatcagaaactgcattttaacgggcccccagcagaattctgcatttcaaatcaggcctctctctctctgtctcaagactcaatattgagcagctgtgacttctggatagtcatatatgggacacacttccttgccaggaagcacctggctcctcagtcagcttagtctgagtcctggcctggcctaggagagaaaaattcatgtcctgggttctgagcaatgctctcctgtcctggatgcctgtcagactcctatttatacctcaaaacgcagctcaaatgttgtgtcttatgaagcttctgtgactccttggtcagagcagatggtctacatgtgcatccgcaaagcaagttgcatattctgccaaccatttgtgtaagaatttccttactggcaacagagtgagactctgtctaaaaaaataaatgaataaataaataaataaataaataaataaatagtttccttactgatctctgcctgagcaagacggcttaaccttgaaggcaaggggggtttggttcctcttacctcagccccagctcctttaacacaatgcctagcacatggtaggtgtttgataaatgtttaccaaatgaagggatttcctgcaatgacctaggagacaagaaggtggaataaaagctcacaagccaaaagtgggtgggaaaaggtcttccaaatcccagtgctgtgtgagcacagggcccactgatgttcacttttagaagcttcccatctatcttgttctcttctcaccagaaacatctatgcttccccaccaaggtccacctaatcgcactttacctttcaggaccacctttcaaattagctgggtacaaactccacagcaacttcctgccttagctccaaatactcagctgcagtcctggtgtggggcttcatgctaatcctagcactttgggaggccggggcagcagatcacttgagcccaggccttagagaccagcctgggcaacatggcacaaccccatctctacaaaaaacacaaaacattagctggggcttgtggcgttcacctctagtgacagctattcaggagtctgaggtgggaggatctctggggccgaggagttcgaggctgcagtaagccgtgatcatgccactgcattctagcctggatgacagagtaagaccccatgtctaacaaacaaaaactacaactctgaggctaatttggtgggagttaagagcttatcctactgcggtgtcactatgagtgatattgggtggctttaagattagggggtgtttacatttctaaaaagaaaattgctccacaaagaatgtaaagttttggtgtgtgcaggggtggggtcttcaggagaaaaaaggcaatagctccagtaatactcagtagctgactgtcctgcccacctctcacccagagcctaggcaggggctggattctcacctcagcccctcctcagcgtaccctggatgtggatggtccctcagtgtgaacccacctgggctctgactgtggctgctcttcccactgttatggagccttagtgggtgtggcgcatgcagggggcctgctcaggagaccaagtgccctttaagtctcaagacctacatttttgaagcacccatgtcagatgttcaggatggaagggactcagatgctcaaatcataataaaagaaagaatccatcccactctctcaggtgtggtggaattaaaattaaatgacaatcagtaatctaaaatgatcatattctcagtgttgactttatcattcagccgacgcctataacccagggatggatgaggcattgtggaggaagagtttatttcttctttctgaaggctccatcagctggagtttttgccctatgacatggagaggagactttgcttcaagctaagttaggactgagcacagtggctcacccatgttatcctagaacactggggaggctaaggcaggaggatcacttgagcccaggagttcaagaccagcctgggaagcagtgagatgtattctgttcaatttttttttttaaattagatggtcattttggggctttcctgtagtcttggctactctggagactgaggcagcaggatcacttgaacccaggagctcaaggcggcagtgaactatgatcaactcactgcactacaacctgggtgagagagcaagtccctatctctaaaaaaagagaaagtgacctgagttgggacaggacatttggactttttcattaaaattgtatttcaaatgttgtaaaacttcataatcagcattttacccttttagaaagtagaatctgctcaattacagaaaatataaaaaatgtagtgaagcagaaagatggaaaacacctgtgtccccactgggaggatccggatgaacctctgcctggcagagcctcagagacgtcagtgaaaaggggccctggagctgtgctttgcagctgccccctgagtttccacccctggtttctgtgcatgtggtgtctgtgcaggatgacttagtgcagtcacactgtatgagttattttgaatcttgcttttcaaactttattattatcaataagcaactttatatgttatcataaactcttcttaaacagtacttttcctggctgtatactatttccaaaaaatgacccagctactcttcttttacaagttcttcttccttattgtaaataatatctgattaatatccttatacctaaagattcttctatattttgcatttcattgtagaattatagatttctcaaatataaattatttggtcaaactgcatgaactttttttgctttgtttttgagatggagtctcactctgtcactgaggctggagtgcagtggcacaatctcggttcactgcaacctccacctcccagggtcaagtcattcttgtgtctcagcctcccgagtagctaggattactggcgtgcaccaccacacctggctaatttttttatttttagaaaagacggggttttaccatgttggtcaggctggtctcgaactcctgacctcaggtgatccacccgcctcggacacacatgttataaaattgcttatcaaaagcagcataccaattatattcacccatcattcacctcttatttgttaagcccctcctctgtactggtatgttctagatgctagggatacaagtggtggctggacaaggtcctggcctcaaataatatgttttagtggtacagacaacaactttcaaatttattctaatatcagtgataattgttatggagaaaatatactcgggttagaagattggtggtggtgaggatggcaggagatatattttgttggataagaggttcctgagaacttgactaagggacatttgagcagagaactgaatggcatgaggagtgagccatgtggatccctagggagcaagtgcatgtgggagtaccagcaggggccggtggcagagacaggattgagcagtaacaagagactggtgcgagtgcagatgagtgatctgggctgagagtggtgagatgaggccagaatggccagaggggccccgtgttgaggggctaataggaaatggagagaggaagggaagaggctggagtgtctctgggatgtggtggtgaggatgggctctaattcccattcgaaaggttcactctgcctgttgtgtgggtgatggacagctgcatgagatgcagcaggcagcccagctggaaggcccgtcggatttactatcctagagagaatggctctggggaggaggcagtagacgagtgtgaagtgattggttttggggttaatacatttttcagatggtctcagcagttatttaatagagaaccattcatttatttccacagttgattccagatggcttactacaacaaaccaaataataaacatacatgcattatttaaaaaccaacaaggcctggcgcagtggctcatgcctgtaatcccagcactttgggaggccgaggcgggcagatcacgaggtcaggagattgagaccatcctggccaacacagtgaaaccccatctctactaaaaatacagaaattagccaagcgtggtggcgggcccctgtaatcccagcttggggaggctgaggcaggagaatcgcttgaacctgagaggcggaggttgcagtgagccgagatcgtgccactgcactccagcctgggtgacagaatgagactccttctcaaaaacaacaacaacaacaaaaaaaaacagctgggaaaatatagacttaaaatattaaggctggggtaaaactagaacattactcagcaagaaggaacatctgaaacatttgcagaaatggagttgactgtttccccagccatagatttgttggctcacaattgtgttgcatcagggagccacagaggggggtgacagtgcaggtcacttggcccttgtttcctgtttcaggaatattttcctgttttacacttaaagtcaaagcaaatttatgtaactgtaatttgttcaaaaatgaagtcaacagctaaaaagtcagaaagtaaatgtacaaaccccaggggtctaaggacagtctatatttctcccccaaaatgtcctcaccctgcactattgaatggagacagtcctttccaggcgccctaagatgcaggggcgactgggctgcagccctacctacaggtgtccttctttatacctgcagtttcctttacacctgacagccaacttcactgacctcacctgagctaggaatttgtttttttggtattggttctatttgagtcattgtgcaggcttaaaactgtgacatggaagttttgctataatggtttttctttgatggaatttgacacgcacagtggctctggcttccctgtcactcccaggagagaacggagtgtcctgcacttttttttcaagatccctgtgtaagagtgatcaagagacttggagtcaggggctcctccaatctcaccttcctctctgatgctttccagtgtggggcccttggctctctgcacatctgattaatacaattgtctcagcccctgaaataaaagcacaggtgcacataacactgactcctgcgtgcagtgccaaggtggggaggtttcctggatgccaggtttagcactttgactctcattcacgcacacacacacacgcatacacacactctctcacatacagatacacatgctaactgatacacacaggcacacacagtcgcacacacattcacacacatatttagacacactctcacacacagattcacacacacgggcacacacacacaggcacacacacacacacacatgcagactgagtgagcgttgtgggacaggctgacttcaggggtggagtaaaaggagtctctcagttccttctcagtggactttgtctctttttcctggaggtggaggagtctgcactccatgaggggaagtcctctgaagaagcggggagatactcaggagcggggtccagagatggacagggatggagaagtggagacaaagcggagggggcggggcaagaagggagcccacgaggaatggggagagggaggaccttctagaggtcagaaatatcacacgcagaatttggttctttgtttttgtgttttattaagatggatttagtaaaccagccgaagtgcaagatatggagtctacattgcaaaggacacgtcttagtctcctgctagtttgaactcatcagtagtagctaggagaagagtgccagaagccttgcgtggggcgcgcaacgcccctttgcagcgaccccattctctgcatcccacggacctccccaccagggaccatgttggtcccctcccacccaacaggaaggaaaggaagaagtctgaaggctttggatcctccctagcgcactttttctcgccatttattcccagagtgtccttgcctccgctccgctatcccaaccccactataacaaagcacatcctgcgcgctggggccagaaatcctcctttggcctctgaatcactggtgccatttcactgtgtcctgtccttccggccattgtcactgggtgaagccccagagagcttgagcttggagcccaagagagctggattcttagagcgtagctgtccgcaaaaacattcttttttttttttttggtctttattattattattattattattattattattatactttaagttttagggtacatgtgcacaatgtgcaggttagttacatatgtatacaggtgccatgatggtgtgctgcatccattaactcgtcatctagcattaggtatatctcctaatgctatccctcccccctccccccaccccacaacaggccccagagtgtgatgttccccttcctgtgtccatgtgttctcattgttcagttcccatctatgagtgagaacatgtggtgtttggttttttgtccttgcgatagtttactgagaatgatgatttccaatttcatccatgttcctacaaaggacgtgaactcatcattttttatggctgcatagtattccatggtgtatatgtgccacattttcttaatccagtctatcattgttggacatttgggttggttccaagtctttgctattgtgaatagtgccgcaataaacatacgtgtgcatgtgtctttatagcagcatgatttatagtcctttgggtatatacccagtaatgggatggctgggtcaaatggcatttctagtcctagatccctgaggaatcgccacactgacttccacaagggttgaactagtttacagtcccaccaacagtgtaaaagtgttcctatttctccacatcctctccagcaactgttgtttcctgactttttaatgattgccattctaactggtgtgagatggtatctcattgtggttttgatttgcatttctctgatggccagtgatgatgagcattttttcatgtgtctgttggctgcataaatgtcttcttttgagaagcgtctgttcatatcctttgcccactttttgatggggttgtttgtttttttcttgtgcatttgttggagttcattgtagattctggatattagccctttgtcagatgagtaggttgcaaaaattttctcccatgttgtaggttgcctgttcaccctgatggtattttcttttgctgtgcagaagctcttgagtttaattagatcccatttgtcaattttggcttttgttgccattgcttttggtgttttagacatgaagtccttgcccatgcctatgtcctgaatggtaatgcctaggttttcttctagggtttttatggttttaggtctgacgtttaagtctttaatccatcttgaattaatttttgtataacttgtaaggaagggatccagtttcagctttctacatagggatagccagttttcccagcaccatttattaaatagggaatcctttccccattgcttgtttttctcaggtttgtcaaagatcagatagttgtagatatgcagtgttatttctgagggctctgttctgttccactgatctatatctctgttttggtaccagtaccatgctgttttggttattgtagccttgtagtatagtttgaagtcaggtaacgtgatgcctccagctttgttcttttggcttaggattgacttggtgatgcaggctcttttttggttccatatgaactttaaagtagttttttccaattctgtgaagaaagtcattggtagcttgatggggatggcattgaatctataaattagcttgggcagtgtggccattttcacgatattgattcttcctacccattagcatggaatgttcttccacacaaatattcttgagatttcttcagatctgaaagtcagcctgagtttttagacttgcttcgaaagactttggccctgggaaaaaggaaatcagtactccaggaacaagattttcctcgactttgtctcaacccaaagacgctaaagcagcgcagttttcaaacgtgctttgaaaataaatgggacagtgtgtccacactggattttgcctttccctttttattacagcccgccccttttgtaaaattgttacacatctctctactgcactaaaaacggctctatcaaagatactttgagaaagatttaatgacatgaaaatatgaagcccccttaaaagagagtttctggagttgggttttaattaacactttggtttttaaaatcctgtaactatttgggtgtgtggcttatctttataatattttcaaacaaatattttttcttaaccaccacacaaatccaagtttattatttttatttttaaattttatttatttatttctgagacaagatctcttgctgtcacccaggctggagtgtagtggtgagatcatagctcactgcagcctcgaactcctgggctcaagctatccttcagcttccagagctgggattacaggcctgagccaccgcgcctggccaaaatccaagtttattctgtaatataaaattccaacatttcagagaaggtgaaagtcacaacgttatcccagtccctggggtccctgtcaaaattttggggaataatcctccatgttttcccctacttaaaatatatattatgtaagtggtattactggtattataattccatatatcctcgtccttttaaaaatggataaaagtaggctgggcacagatcttctcataacaatacttacaaatttatcctcctctttttaaggactgcgtggaattttatcgcgtggctattctttaggggactatggaaatgttatttctttatcttcattgtggtagtggatatgtgggtgtgtaaaacagccaagcagtacaactcaatgagctgtacatttcaaatagatacattgattgtgtgcaaagtatgtcccaataatggtttaaaaatattattctatttgagatttgtactttgattttgtaaaacaaaacaaaacccttgttcttgcacccacgagatgcaccctggcacatctggaggtagaagctcatgttctctgcagcttgacctcgcaggctctgaaataagaataataagccgtatatttacagattcacacacagagaaaaaaaagctttggtaaaaatgttcataaataacaaaactagataaagggcaaaaataaaattagaaataataaaactacatctttcagatattattctcaccttcacctttcctctccccttttctccctctcccttcctttcctcgaaatgtccccccatccttccctcctttctccattctctgcatttgatccccatgtattccagcctcgaggcaaacacacgtcaccgcgtccgcctggggcaggtcagggaagggacgcgaggcagccgtgtctccgcattctgtgagcggcagcgccctgggcctcgctgatcttgtgtcatttcagtgaccttcgctctagtctttgacggggccacactcggggtgtaaattaggatcctcactgaaggcgcgggaccctgagaggctttttcctggtcccttagttgtgagttttcctgcgggcggcggagcccgtttccaccagaaccgcccagaggcgggcgctgccttcctggggtgacggagcagctggaagcgttttcggatcctggaatcagtgggcggcctgcgggaggggctgaggcgcctttccctactcacccggctccgaatccaccgcggtgctgtttcaagcgagtcagattccagatcgcgctccagcccggactcggaattcctgccccgcgggtctgcattttcacagcggcaggtgtgagtgccccgcagctggagcccagaaacctgaaggcagctcggccctccccagcccacagcgccgttattccgtttctatatcagtaaacacttgtcattttccgtagaccagggcgggatgatgggtgatcccagtcctcgcagtgaactccgggccgcagtcctgagaacgcgctcgggcgcccagcgcagccgcgtcctgagttacacacgcgaccgcgctgggccttttctctttcttttccggacccagcagtggcgcctacagtctgcgaggagaaaatcacctttgtgctggtaagtccaggaatctaaggcgagtgctgagggagaaaacgtagttgatggctcagagcagaaggggctggaggtagggtagagggggagggctttggacagaaaagacctgggagatttggttggggaggggcagccaggcctagaccctggggagcgactcatccaaagtccaagatcatcactgcctcccctaccccagaaagggagggattggcttcatgtcttgtcgcgatcacctctaaatgcgttggaacaaactttgcatattattattattagtatcatcgtcattgaagtattaaaagtcttcttgggggtgagctgaatgagatcctttgctggaactggcacagggagaaaaagtcctcgagagagggtagacactgtggagggaagagcttgggaccagcgtcaggagagctgggtccatctccctctctgcccctcactacccttgtgacctttagcagtgtaaataatccctgtaaggtggggacaagaccccagtccctgctgtgctcaataaatgataatgctcgaaataaataatcagtgaatgtggatgggaaaactaagtaattgttaaaactctgtggtgtatgacattttcatctacagaaaagtgtaggctaggggtcctggggaatggttagtaatcataggtagagttccattggaaaaaaaaatgctcgtaaagctgacgaagatggaagggacacagttcgtgatcatggatggttcattgtctaatgggggttggtaccagatggtaaatgacagctggacgtggtggcactcgcttgtagtcccaactactcaggaggctgaggtggcaggattgttctagccctcggctagagcgggagcggcttggcgtttctggggggtctgaatgggtcgcagcgagcgcgatgcggtcgcggcggggctcaggtgcgatgtgcagcgaggtgcgggagctggacgctgccggttgccgccactcctcagccctgcttttcagtctcttttcagtcctcctcgggatcgcgcatcacccccaccccctgcactttctggtctcttcttgcacttgctctcctcacctctcctccgcctcctctcactttttggacaaaccttctgaagtccctgggttcctgggctgttcctgtgaatggcattcgagggcccttccagctctgccgctgaggcagtcacatcccccggtgctcagagcggctctcgggtccctgaagccctgtcctctccctggagtccgcgtgttctcagctccagggcgggccgcagtccctggagttggggccctccttttttcgggaccaggagctggtgcttcttattgctgtggggactatggggctcctgagtctcaagctgaggggttggagtctgccggctccaggcagaggattcttcctgcgactgctcccatccccagctcattctcccttcgcctcccgttcccagggttctttcctctgtcaaccctcccagctactgtggactccaatggtctaaggacaccaagttccctcctacttcctcagcttcctttctcatggccccctgggtcctgttgccctccctgctccctgctacccctttctatctgcagttctctgatccatttgtagggtgtcctctgccctcatcccctgctcccaccaccgcaggtccctcctgcctcccttatgggcctttcctacaagcagccttcacccagtgctgcccctatgcctctccattcccagctgtccctgaccctaactttctggtgctgccttttgtcgggggagtcttccctccatcccactcccctccaggccacttaaggggagccctggtgctaatgaaagttgggccttaggcagggcgcagggcaacgcagatgctccctcccctccagtgcagatgcctgctctgggccctgcctcaggtgacccgttccccactccttcatcctcagcctcaccctcttgaggaccccaccctgaaaccctcaggtgctggaccatccctccctggtccctctgcccctctctgccttgggaccttgtgctgttcccacctcttgaccagctgccttgggccctcagcaagttctcaccttccccaaaccccaccctcccccagacaacccctcccttcctgttctcactttaccccaagttctcccagggtcacccccccttccttctcatgccaccctttagtccttgccctgcccatctcctcacccccacccagacccaacacaggctctagtccaacggctccttgaccctcatcctctttcggttccttgaccccggtgggctgtcagttcctagacttcatatccaaaatcttcacttaccacatagtgggctgtggtcatcccctcctctgggccttctcccagcaccaccttcctcctgtgagggttttctaacctgaaccctcttttggagtgtgactgctccgccttcagcaccactcctctctgaaggcccttcctcaggccttgttttttttctctctgaccaggaccccagcctctttctaattctatattattgtttggtatgctgtgacaatttcttttttgttgtttaattgtcgtgaaatatatatataaagttcactattttcaccatttaaaagtgtacagttcagtggcattaagtacattcacatttttgtgcatcctgaaactctgtgcctactaaacagtagctccccattcctccttccccctggccgctggaaccactggttctactctctgtctctatgaatttggctattgggaattatgctgctatgaacatgagtgttcaaatatctttttaatgttcctgctttcatttcttttgggtaaatacccagatgtagaatttctggattacatagtaattaattttttagtttttggaggaagcaacacactgatttccatagcaggtgccccactttgtctttcccaatgtactacacaaatgttccagtttctctacctctttgccaaacttgctttctctctctctctctctctgtgtgtgtgcgtgtgtgtgtgtgtgtgtgtgtttgattatagccatcctaattggtgtgaagtagtagcccattgcagttttgatttgcatttccctaataactacagatgttgagcatcttttcatgtgtctattggccatttgtatgtcttcttcggagaattggctattcaaattctttgcctacatagtttttttgagtcttatgtttgtgttacaggaattctttatgtattctggatattaatcttttattagataaatgatttgcaaatattttcttccattctaatggttgctttttcactctgcagattgtgttttttaatgctcaattttttttattttgatgggtccaacttatcaattttttctttgttgtctgtgctttggtgttatatccataaaagtgttgtcaaaacctatgtcatgaagattattcccaatgtttcattctaagaatttttcagttttagttcctgagtgtaggtctttgatttatttagagttaacttgtatatgtggtgtaagtcaggagtccaacttcatttctttttgcatgtgaatgtcgttttcctggcactgtttctggaaaagatgcactgatcctcccttactcccatcttgtacatgatgagccttcctcaaaggcagcggcccgcgactccatctcaccctcacctgtgtagcacagccatgctggtcatgggtccctctgagcctgggtcccttcccatttccaccctcccctctggcaagaccttccttccaccactgccttcgtgctcctccctcaccactgcagggcagcctctctccttggcctcctccctatacccttaggtggcctgtggccaccctgccttggcagctggcctacatgtttgccatctccattcccccttcttctgttcctcagtctgctcctccatcctcctgccctcccagttttccttgtatctgaaatcttcattcttgtccctttgcatatgtacatttcctgcctcctcagaaaggttgagacagcagacctgtgtgttaaacatcaatgtgaagttacttccaggaagaagtttcatccgtggtttcttgttccccagggccccacagtcttcattacaacctcacggtgctgtcccgggatggatctgtgcagtcagggtttcttgctgagggacatctggatggtcagcccttcctgctcttcaacaggcagaaaggcagggctgggtcctggggacagtgggcagaagcagttctgggagctgagacctgggacacagagactgaggacttgacagagaatgggcaggacctcagaagggccctggcatatatcaagggacagaagggaggtgagaggtggcagcaggcaagagtgatgggagaccttttccaggagagctgggggcagagagcagggacctgtctgtccccactggatctggctgggggcaggggtgaggaataggggtcagcagagctcggtggggaggtaacctggcactcagcccacacagaaaggcatggaggagggccagggaggggtctcctctggtctgagttcctcacttggaactgctgggtgggggtagccttgcattccctccaggagattaggggttgtgagatcaggaagccagcagcaccaggggctctaggcattcctactcttatgggtagctcttcctctctctcaacctggagactcaggaatggacagtatcccagtcctccagaactcagacctttgctatgaatatcacaaatttctagaaggaagatgctatgccggccgagacacactctcaccctatatgggtagactgcaggcagaaactacagcagtatctggaatcctgtgtgggtgtcaggagagcaggtactgggcctgggtaggggctttcctctcccctattccactagagtcaccccgacccccaactctgtccagggaaaccctccttgtgctatggatgcatgtgttttctgttggtgtgttatatcctgatttttctctcctgttagagccactggaaaaagacagtgggtcagggattgaagggtccagtgtcacaatctggggaagcagtgggccctttgacagaagcctgaacctgggtgtgtgtcaggcaggagaggaaggccccagggccaaggctgccccatctgcttcccagcctgcccatccctaagagttccctctggccccatgtaccaggagcccacccctgacattcccctcctcagcatcaatgcagggatcccagagcataaagacacagtctcgaggcccatccttctgccagccttgaggaattggtccccagggtgaggacagacttgcagaaggtctggggtccgtgaggacttctgccagagtcggagcagtggagcggaccagccctattccctgcatctccattagaggggagcagggtttggccatgtgcctcattgtctctgccctttcttctccagtcccccactcctccaccatgagtgtggcctgcagtgaggccctggagggcaacatcaccctgatatgctgggctctggcttgaatctccagaatatctctctgacctggtgacaggatggggcgtctttgagccaggatgcccagcagtcttggggtgttctgtccaatgggatgggacctaccacacagaggtggcctgcaggattccccaaggagaggagcagagggtcatctgctccatgggatacagcaggaatcacagcactcaccctgtgtcctctagtgaacctgggaccacccttgagggttccaacataaggaggatcaggccagggtgggggcagcaggaacggctgtggctgtgggtgcccagtgtgtaacaggccctttttttcagggatggccctggtgcttcagagttgatgaccagccattccatatgttgctgctgttgctgctttcatcatcattagtattattagtagtattattattctctgtgtcctttgatgcaagaagaagacaacatcaggtgcagagggtccaggtgagaaaaggggacagttgctagagatgggagggtccctgtctgggctgtagggtcccctcataccttctgtgcagataggcttgtaggtgacaaggcttctggaacaggcgatgaaagttggggtatttgggaggggaatgagagccacgttgccatctacatccctgtgagaaagaaactcacccattcaaacccaaagaatagactcagagacccagagaacagcgaaagagagacttttaatgacagtcttgcaagatcaggtgtctggagtgcaggtacacctgggacagtttcaacaaactatttcttccctagtgtgcaagtcccttccccaattcctcattagctgagtactacggggttatagtcttcctgggcatcgcctattggtagttgtattaagacttcaagtatgttctttagggtctttttgctgcattttttgctgcattttgttgcagccacccataatgcatggcgactgtctcaagactctgagcatttgacttatggccctagtggctgcacttaggtgatggcaagctagcccaaactaaattctttggtgaggtggggaggggggtcattgagggggccctgaccagtaggctcctggacactgggtcaaagggaaagcaggaaggaggggattgtggcttagtatattttgcttctttatctctttgtttccatgtggcctgcttaaacatattctaaggcacttatgaaaatgaaccttcttcacatgtaggttattttttacacttacctcctctttttctttttaccctttttggtcttattttcacttacatatctttgtttattaactgttctggaagttttttactttcttcattataggaggagaagtttagtttggcttttaataatagtaagtcattctgttgggacattaggggcatttgtttactaatagctgctttaattaacctttgtgttaaataaacccttcacacaaggtatgatacaacatcctatggctgttaagaccccagccataatcacgagagatgtaagaattgaaggtaccattcctttctatttttcaaaccaaccttctaaccagttagtaaaaaggtcatttactcctgtgttttctgccagctcgttgactagagttgttagtccctgccatccctttatgatggttccatttggggcagcattgttgtgaatggaagtgtcacattttccacccagcatatcacatatatcacctttctctgctaatattatgtccagtgtaattctgttttcccaagccatttagctagtggcatttagttgtctggctactcccttaagggcattttgcgtgtaattgatgaatctttgctgattataagacatgtaattaatctaatttacattcttgttaatagttgaccaccagaaaagtgctgactcaaatctagcaggtatttggtttcgtgctttaaatttattaggcactcctctaggtactcctatggagtttagatagataaatagatagatagatggatagatagatatacaaagctttcatccactgttccagaagccttgtgtgtatgtgtgtgtgtatatatatatgtgtgtgtgtgtgtatatatatgtgtgtgtatatatatgtatatgtatatgtttgtgtgtgtgtgtgtatatatatatatatacacacacacattatatatgggttaaaataaattgctaaattactctgatctctatgaccatgtgtatttttagctgtttcatggaatgacagggtgaacggaatggccaattgtactaaagcacaagtcccggtccaattggacggtaacaagttacggaggttccctttcccgaaataccaccagacatttgcctggggtatatggagagttgaatggttgccacagtctgggttaccagtgacatttaggatgtgggtgcaggttgcgagttttcccacaggtttatcgaacctcaccttctgtctagagtgacaacaggagtgatttatattccctatagagaatgaggggattgctttaggatctgatctctgcaaagtgggaaagagcaatgacagacttttacaagtcttatttccccatgcaaccttgtcttggtatacagccaacacgcaacacattcctttgggattagtatcccatccaaggggaaatggaaccacctgtgcctgaggttgaccagcagcacatgcataacagttacttttatcgagggcttgtgctgaaaatttcacccatttaacacaggcatttatgtctctatatcctgttttaatttttaaagtctgccttaagtcagttactttaattatttttactctcttaggtttattgtttggtgggttaaaggaagttaatgggaccaggagttctagtaattctgggtgggcttggggtagagttggtgactaacctaaaagctaactgtcccacgggattcctttctgagatatttatttttaatttataacttcaagatttctggtttagagtagctgggttgtttatagtaattaatataggattgcactttaaatttttacagttaggtggcgtgtggttcttatacaatacttaggtttcctttcaccccttgtgttaggattaattctaaccatatcagcccccagtgatggagcctgcttatggcttacttttaggttttccttagaattagcttaaagggtttcttaggtgatctatacacttccaatttaccttccgttttttttttaaccagtttcttgacccgagtgtaatgtgtccacccctgatcagctgtttgtacagctgcctcacttgatagggaccttcccagcttgggtggagcttgtcttctttccaagtcttaattagcactgagttgccaagctggaagtggtgaactgtgaactcaaggggtggggtttgtgttacaagttcttttaaccttaagttgtttcctgggagttcacacaattcccacacacttgtttagccagggcatacatttctatacacccataattctttagtatttcatcatacatgtcctggggaccccaatgacttcccttatgcaatatagacattagattttttttctttttttagacagaatctcgctctgtcacccaggctggagtgcagtggaacgatctcggctcactgcaagctccacctcttgggttcatgccattctcctgcctcagcctcccgagtagctggaactacaggcacccaccaccacgccccggctacttttttgtatttttagtagagacagggtttcactgtgttagccaggatggttttgatctcctgaccttgtgatctacccgcctccacctcccaaagtgctgggattacaggcatgagccaccgcacccggccaacattagattttttattatgggtttgtttattatttctctcccatcagggagcactcaccttccattcttagtttaagtggctcctatcttgcctagcttttcctcctcttttgaaaattggggttttaatatcaccttagggatatctgggctaaacagtttaaatttttcctccagggagacttgcttagcagccttatccacaagcctgttccctacagcttctatagtgtttcttttctgatggccatttacatgaactatggctgtctctgctggaaacaggaggctttctaaaacttgttccccatgtaccaattattttgccctgctattttctaggccctgctctgtctagattttttcaaaggtgtgtactactttataggcatatttggaattagtatatatagtgtcttcttgatcttctaggagctttagggtctggttaaaagcataaaatttacaggtttgggctgaccagttattgagtaatttaactttttcacataaggattgtttgtttttgttcatgacagcacagccattgtgtcttttaccatttattactcaggatgacccattcataaacaacctcatcccattatgtagtagagttcctttaaggtttggtactaactttagtttgatactctgtgatatctaaacagttatactctgacgccttcttattctcctctccttttcataagaaactggctggtgttagtttagtcacctcccgagggcccattgaccccaggaggaacttggggaggcaagggactgatcagctggcatcccagagtgcccttggccgggccctgctgggtttggctttgggccaagagctgctggtttgaagatctgccagcctatggagccttccctgatgggtactctcattagaaaaggcatttctggctccgccctcccttcctgttttttttttttttgtgcttcaaaggcaccgttcctctccgtggcaggcctagaggtgcactgtttgtgtttcaagcaacccccactggtgacccagcaactgtaaagggtctccagtttgtccagccctgggaggggacttagtggcttttcctcctcctgggctgcaaggatcctcccctggcccagcccgactctgggaaacagaacttttacacattccaccttaaagcattttggcagacttttccccagcacgagctctctctacttcagggattgcaaactggcatcctcttttgcctgttttgggtttttaagttatttgaacagaatatcagcattttaaaattatattttacataaaaagtcagaattttgtcctctgacaaagcagacaatctggcaacacagtgccagcactgtaagaagagctgagcagccgccacagttcccacccagccctgcagccctcctttttattatttgctggccctgtagtcatttgagtttacagccctagtactgattttccttatgtagcgaccccagcccttctgctgccttactgacagctaactgcccctggtggccttccagcctctcactaaaacaacaacaaaaccttaatgttatcttattcatttactcttccataacttgaatccttttgaccacctcctgataaacagccatctagtttttgctgtaggcaacccgttacacctcaggcagcctgatcctaaactctcctccacatccctttctcacttgcatccatccccctgttcccgggctttgtcgttcctcagtggccacgcactgcatgcacccttcccctgcacctccttgttgcttaagtccccagaaacttcccccagccctgccaacctctcagcattctctcactttgtcttgtactcttttttccttttacattatttgtctccccagttttaccttctgtgtttctctttgatctctgtctcttttagtctctcttgctaattttcctcttctattctctctctgtcatcccctgtttcctttctgtctcacactcagcttcttcctctttctctgggcatgagccgaactgtgctgtgccctggctccccttgtctgtctgcaaaaacaggcagctctgcggaaatgactcagcagtaacctttatcaacagcttttagaagccagctgccacacacagctgtgccgctggctctctcttccttcaggtatagcagcttaactctctctctctctctctttctttcacacacacacacaaactttctgagcttccctcagtatttccttaattggttttttattccatccgttaatcttttgcagtttcttgtaatattacatcagcttttagttacaaaattaacctttaaaaggccttgccctactgggtcctctggatttaatcctgaatattttttcacttgatccctgagcctctgcagaaatgcagagggagtctcctcttcttgttgttggatcttgaatgctttggggacgttttgtgtcctatgagtggactgcataatccctctaattattagctccctaaggtcttgcatttggacccgatccctggggtcattattatcccatccagggtctgcatttgggaatttctgcttagctggcaggactccttacccaggaggatgctgctgtctctcccaaatgattatggctgcccttctaattattcccgtctttttcccagtaaacagaatattcatgattgaattatctcagcccaagtataaaaattaggttctaaaaattgatctagctgttctgctaaactgaggggatcttccgagagtggcctaatttcctttttaaaattcctaacctcagtacttgttaaaggcacacttacaaatccaatttattattattatcattattatactttaaactctgggatacatgtgcagaacatgcaggtttgttacataggtatacatgtgccatggtggtttgctgcacccatcaacccatcatctacattaggtatttctcctaatgctatgcctcccctagccccctaccctcagacaggccccagtgtgtgatgttcccctccctgtgtccatgtgttctcattgttcaactcccatttgagtgagaacatgcagcatttggttttctgttcttgtgggtctttctctgagagacccagagaacacgtagctgatggtttcctgagaatgatggtttccagcttcatccatgtccctgcaaaggacatgaactcatcctttttatggctgcatagtattccatggtgtatatgtgccacattttctttattcagtctatcattgatgagcatttggattggttccaagtctttgctattgtgaacagtgccgcaataaacatatgtgtgtatgtatctttatagtaaaatgtttataatcctttgggtatatatccagtagtgggattgctgggtcaaatggtatttctggttctagatccttgaggaattgccacattatcttccacaatggttgaactaatttacactcccaccaacagtgtaaaagcgttcctatttctccacatcctctccagcatctgttgtttcctgactttttaatgatcgccattctaattggtgtgagatggtatctcattgtggttttgatttgcatttctctaatgataagtgactatgggccttttttcatatgtttgttgactacataaatgtctttttttgagaagtgtcttttcatatccgtcgcccactttttgatggagttgtttgtttttttcatgtaaattaagttctttgtagattctggatattagccctttgtcagatggacagattgcaaaaattttctcccattccgtaggtggcctgttcactctgatgatagtttattttgctgtgcagaagctctttagtttaattagatcccattagtcaattctggctttcgttgccattgctttttgtgttttagtcatgaagtcttcgcccatgcctagatcctgaatggtattgcctaggttttcttctagggtttttacagttttaggtcttatgtttaagtctttaatccatcttgagttgatttttgtataaggtgtaaggagggggtccagtttcagttttctgcatatggctagcgagttttcccaacaccatttattaaatcgggaatcctttccccattgcttgtttttatcaggtttgtccttccttacattgttctaattctttcctcaagtttggataaggatttaagggagcattgggtttagctccttcatgacctcccaaatccttttcctctgaccttccttttgccccctgatctccctgtcctctactttgtgagatgtatagggtgtagggcaagcgtgttaggggatcccagggcttttcactgggtgagggctctttactatgctctttttatttctctttaagggggaacacggggctcaattcactaatccagcaaacagcataacccatctcctcttgtgaagatggggttttatcattcacatagagaattaaagcttggcatatacagtccttatttgagctaaacttaggccaaaggactgaaggctgacaaatggactttttaggccagataaaacagcaatacattattattttttgtttttccttatttcaggttttctagttatttttgagtcagttttggcaatttctatctttgtatgaatctgtccattttatctaagtggtctaacttattgacttcaggtttttcagagtcttcacttataatgcttttgaatttctaaagggtcactagtgataatctctcttttgttcacaattttggtaatttatctcatttcttatcatctctgttttgactgttggtcaagaaaacagacagaggcagcagatggctatgtgattctctagtgggaaggctttgatcatacatggctggcaagccagactgatggcagcaaccccaaaggagctgccaagggatcttgacaggaaagtcactgactctggattgggctatgctcaaccaggggaagaggtcaatgcttcaagggctatgaaatcaccagaaaaaaagagattgcaccaatgtggactgctgagtcccatttctttacgcaagaaaacacactttacagcctcaaatggctaacaatgcacagggagatgtcctcctcagaagaaaactttgatagaaaattgaaatggtcagttgaagcattgtttgtctaaaaactggcaatatagttgttgggcaatataaacatgaaggactggcttttacatcttcatgaatgtgctcactgtccacatgggtggggcgcaagagtgactcctctagatagcttcctctcttttacctgatggatcaggacgatgctgttatgactatacatacaattcttctgaaggggagaggatgctggaataatgactacgcttcacctcaaatttcttttttcatatgtgatgcagtggtaccaggaatagggatgaaaatcaaagtgccagaaacaggaattatctttaagccaaaaaccataactatatatttacatctttatataagaattcccaagcaactcaaagatggtgctatgccttcatttcatctggcaaagtcaggattaacagtaaatagagctatatagcctggtagtcagatggcccccactagttccttacctacataacctaccctctatgaccaagagtagaccgagggaaggcatgctagaatactattgctgcctgcagtctaggtcagcacagcagacaaacctgatgtcacctctaaaactggaaaagactgatataaagggacagaaggaggaatagtggctgagggtaagtgaataaatcaaagggttatataatgaggaaaattcaatattagcttaactcctcaaaagtgctgtgagcaagagaagatattgtctcttaggtcaattatactgggtgcctaaaagagtgaagccatatgtccttgagaccattcttgtttttggagcctggtaaggttgagtggtgtctgcaaacctgagtgacttcattctgggagacatattcatatgagaggatggtaaactgttctaattttgaatgactgaatgagactctgataatacgccaatacctctttacttttataatccttttcctataaaagatatgtggtcaaagaaaagcgggtaatctgaggtataacaaaaacatttagtctttgtccctggtttctcctaaaaaccttagaatctcttgcgtgataagagttagaatattaatgagaggactcatggctgagcggaccctggatatcttgagaatgggggctggctgccagagacacatacctgtgatgagagcgctgtcttattccattttgtgttgctataaagaaatgtcagagactgactaatttatgtaaacaaggttcatgtggcttgggattctgatgtctggaaatgtttgagcatttggtgagggcctcaggctgctcccacccatggcagaaggcaaaggggagctggtatgtgcagagatcacacggtaagagaggaacagagagcttaggaagttgccaggctctttttaacaactggctctcttggaaactaaaagagtaacaattcattcacttccgagagaggacaggatctctttattcataaaagattggcccccatgacccaaacagcacccattaggccccacatccaacactgggggtcagattttaacatgaggtatcagggggtaaatatttatatcattgcattctgtccctagccagccagagctcatgtttttctcccattgcaaaatatgataatttcccaattgtcccaaatgtgctaggttgttccagcatcaactcaaaattccaaagtctcatctgagactcaaggtaagtccctatagctgtgagcctgtaaagttttaaaaaggttatttacttctaaaatattaatacaacagtggaagagacatttcttatacatttccattctaaaaggaataaatgggccaaaagaaatgaatgcagtgtcctcacaaagctgaaactcatcatggaagatgttaaaatttaaagctctaaaataatctcctttgaccctatatcttgaatcctgagcacactggttcaagtggtgggctcacaatgccatttgcagccccacatccttgggtttgctgaacataacccatatagctgctctcatgggtgaaaattgaatacctatggattttccaagctgagcttgcacattgccagtggctccaccatttagtagtcctggtaggggtcctgctcctgcagctccactgggaattgtcctggatattaaatttcccctttaaatatcagttccagtttcagatcatttttttgctcacacatatgtgcatagactattacaacaggaagccaaatcttgaatgctatgctgcttagaaatttcttctatcagatacccttaatcatcaccctcatgttcaaagttccacagatccctaaggagggggcagaatgcctccaagttctttgccaatgcataacaaaagtgaccttttctctaggtcccagtaagttcctcatctccatctgagacctcatcagcctgggctctattgtctatatcactatcagcattttggtcacaacaatttaacaaacctctaggaagttgcaagttttcccccattttcttgtcttctaaactctccaaactcttccaacctctacctgttacccagttccaaagacattttcacattttcagctacgtttattgcagtacccaacttctggtaccgattttctgaattattcattctcaactgttataaagaaatacctgagactgggtaatttataaagacagaaggtttaaattggctcatggttctgcaggctatatgaaagtatgattctggcatctgctcaacttatgagaggacctcaggaaattttcaatcatgctggaaggttaaggggaagtaggcatgacttacaagcctggagtaggagggagagagagcagggaggtaccacacacttttaaacaccagacgttgtgagaactatcacaagaacagcaccaaagagatggtcctaaactattcatgaaggatccatcctcatgagccaatcacctccctgaggtgccacctccaaccttagtgattacaagtgaacatgagatttgggtggagacacagatccaaacaatatcaggggtcatggtggacatgagggtgggctggtctccccacttctcacatgataccagggatgtagacacattcagacgccttggcagaaagagaagacagaggcccttgaagtcacaaaggggaggcatgaacaaatcttgcatctcagtccctcacaaggcagtcttagaaaaaaaatagtcatgaacaaattcagatcagtcatagtaagttgtgacactgaacagcccaccacaccctgaaaaattccaaatcaaagaatctccagagcctagttgtgtcccctatgccccaactcctccttcccttcaggccccctaagttgtcattttacaagccttgagagacacatcagagctgtttcgggtggaacaaaaacaaaatctggtcagagcccacagatgatgtgactaaaggaggaattttggggtggtgagctcccccatgggctcctgtctacactatcccaaggatctcagggatcactcttcccacccctaccacacttgcatgaagcctgagcatagctgcctccttttccatctgtggaaagaaaataaactgtgaaaggccagggaggaagcagggtcatgagatcccagaggagtgtccagaactgtgactgcagacccaggtcagaatcaggaaaccctaggtaagaggatgtgttgaaactggactaattgacctagtgaggtctgtcctctgcgggtaccttcccctgacctgtgactgctgggagtcaggttcccatgactccaatgaaggtgataaatttgtccttcattttcacaagttctttacaaaagagtaagtgttgatagacagagatggtgcctcatgactaggcaggatacaagccaactcccatctggggctgggaatccaccaatggaagaagaaaactcggagctcacccctttcctacctgggctcttattcttccacatcacagcagtgaccacagctctggtgaaaacagcaccaagaacaaccaggacagtaacgatgcccatgatggggatggtgggctgggaagacagctgtaagaaaggaggggaacgtgaggggccctgaccatcaggcctcaaaccctgaccttgctgaagggctccagaagggctcctagttcccgtgagaagagacatgacccctcatccccttccttacccatctcagggtgaggggctctggcagcccatcgtgctgcacatggcatgtgtatctctgctcctctccagaagacaccaccacagctgcccacttctggaaggttctgtaccctgcaggtgtggtctccacaacctctgcatcctacatttggtcctgtccatcccactactgggtcagtgtgatctccacagggtagaagcccagagcccagcacctcagggtggcctcatggtcagagatggggtggtgggtcatgtgagtcttttggggttctgaggggaagagtcagaaaattcaggcactttgcattcctcatgggacattccacctcatgggaccatcctgaaaattgacgggacatctgaagtggggaagggagcaactcagacaccagtctagacacaggcacctggggcaatcttctattccttagaaagttttagtgtctgaggccggaacagagatttctggtcctgacctgagcggaggccgaggtcaaaaaagctggaatcagacccacaaatacacattgagtgtgaggcagagaacaaggcctgagaggaaaattcctggtgcccaaggctgctgtggggacaaatgggaccgcggatcagtatttcagggattgtcttcccctcctttccctcagagacttcatcctttaactgtcccagagtgcagggcaggccctcagtcactctctagtataggatctgaaaacccgggaggactcttcctcctcacaagagggagagggatgttttagcgttggtcccattttccttcccttcttttggaatgtgactcaaggagatctgcaggagatcagggaggcaccccgtggccactggtacctgggcactgcagcctctccttcccattcttaaggactttgctgagccactccgcccaccttccctgcaggtaggttttgagcagctctgcctgttcctccgccagggcatctgagccgccttgtccgctgcagtccaagagcgcagttcctggtttcggacgaggtaactggcgccgtgatagggtatgttcatacccactgaggagactgcagtccgagtccacgtcgcagctgtgtacccactggagggtgtgagacccattcccagcgaccgcggtcagcccaggccgctgagccccgcctcagcctccaccaaccccccagggatttgggcctgaactgaaaatggaatccggtataggcgcctggggcttttattgggtggaggatttccgctggtcccgcagcggagtagcacaatcttagtaacagtgggtagcgcagtacagtggctagcacaatcttggtagcccctgaatggtcacgaatctaatttgtaaaagaggtgatttttggccccattatatataaatgtgtctaaacgcattgcagttagactcacaaagttaagttttactttcccagactgtgtatctgtgactctggtctgttgtatttttaaattatctttatcttatagccctgagtttgtgtgcgcgagtccaggacatctcaatacaaagcacaatgtgttaccgtatattgcaaccaggagcctgtacagaatttaatcacctcaaatttgcaagtgctcaatgcagccaaagtgcccgtcaccagtgctcatgcaccgcctttatttattatttatttatttagttagttagttatttttagaccgagtatcactctgttgccctagctggagtgctgtggcacgttcatgactcactgaagcctcgacctcctgggctcatgcgatcaatgctcctccttcagcctccaagtatctggcaccacaggcttgtaccaccactcctggctaatttttctaaaaaaaaatttgtagaaatgaggtctccctatgttgctctggctagtcttgaactcctgagctcaagtgatcctcctgcctcagcctcccaaaatgctggtattacaggcatgagccgcaatggccatctcatgcacctgcctatatttaggaattattcacatctaagctatgtgcatattttattgggacacttggtcttcttttctaacctgtttatcataaggaggcaattagttattagacagccccacagaatgtattaaagatcaaggtgcaagtaacactgtgccaggctctgaggataaatggattaaaaatctataaaaccctgtgtttaagtctgagaattccattgctttagaattctttgtctctgttcctttacctcacctcctgcttctccagcccttctctctgtccctgtcacccatcaggccctcctctccccttagtctctactactctgtcactactgaattgtggccctagctctgtcccctcacctgctgcccatgactgttctcccaacaatggtcagaaatcctgctaatgtgagtcagattgtgtcatttcttcacttaaaacactccaatgactccatctcactctcaagaagcgtctagaatggaaggcacatgagcacaggggctttgggttgttttgatcaaagttgtgtctgcagcatataaaagcatatctggcacaactaagttaattttcttgaatgaatgaaatatgattgtgttaaaaattgtatcgcacaaaaatcacaaaatgaaaaatgcaaagcaagttaggaaacatttggttttatgcaactactatgcatatcagttcataaattcattccattggagaaaatgtcatatgcctagctgttgaatctgtttatgaattttctattagtacataaccaattaccacaaacttagtggcttaaaagaacactcatttatttgtctgcatttccttcatcagaaatccaggcctaatgtgatagactctttgttcagagtttcgcaaagctgtatcctcatcttaagattggggttctcccccaagcttatgtagagtttgttggcagaattcggtttctggcaattgtaggattaaggtccctgtttccttcgggctatcagagtagacagtggggagggtttctaattcctattggccaccagtgttctttccccatgatcccaccattttcaaagcccacagtggaggaagcccctcacgctgaatccctctcacactgtgagtctctattgtcaggaagaacccagtccttttcagagcttacctgattaggaccgtccaagcaggataatccccatcttaaagccaactgacaggggacctggaatacatctgcaaaatcccttcacagcagcacttacattagtgtcaacagagtaactggggtaatgtgagtaaccaagggtggttattggggtgtcatcatagaatcaccctagcatagcctggatcttccttttgtgtttgaatagaacatacaaattgaaggtaaaaataatagatcattgttagtgataataaaatatatcttatataaccatgaaaattcttgttaaatattaaaagcaaatgacatgtttaatatcttataatcaatttagagcaaatgaaaaattcaatgattcatcctttcttgtgaaggtgtattagttatctactgatgcataacaagtcacttaaaacttagcaactcaaatcaacaaatatttgtcatgttccacagtttctagttgtcaggaatccaggaaaggtttctcaaagttcttctggctcagggccactcacaaaattgcggtctagttgtcatccagggctttatcatctgagggctcaaatggggctggggattcacaagtcacaagaatatcccacatggctgttggaagaggcttcatcttcttattgtctggccccaggaggcctcacttcctagtcacttggagctttccacaggcctgcttatgacacagcagctggcttcccccaaggctcatgatcccagagaaagagaaaaccagaaccaaagtagaagctgcagtgagtttttgtttgtttgtttgtttgttttttcagacagagtctcaccctgtcacccaggctggaatgcagtggctggatcttggctcactgcaacctccgacttccaggttcaagtgattctcctgcctcagcctcctgagcaactgggattacaggcatgcaccaccacacctggctaatttttgtatttttagtagagacggggtttcaccgtcttggccaggctggtctcgaacttctgacttcatgatccaccctcttgacctcccaaactgttgggattacagccgtgagcgaccgctcccagacttagtgagtcttatgatctacacccagagtcacaaactattatctcagcattactctatcagtctgtaagcgaatcattaagttcaggccacactcacaggaagggaatgaagctgcacctctgcaaggaggagtatcaaataatttatatgcatgttaagtatgtacagtgtgcatgttaagtaacgtacagaatgtaatcacctcaaatctgcaagtgctcaatgcagccaaagtgcccttcaccagggctcatgcactgcctccattatttatttatttatttatttatttagttagttagttagttagttatttttagacaaagtatcactctgttgccctggctggaatgcagtggcatgctcatgacttactgaagcctcaacctcctgggctcatgccatcaatgctcctccttcagcctcccaagtagctggcaccacaattaacattattgtttcaggattttgtaaatcaaatacttcttgtatctgactgattttctttaatactttaaaattatcttttgtaaagtgatgaataaaactttgagacagagaatggagatacaacaatatctcagatttttttgcaaatgcctttaatattaatgttctctttgatgagttgcaagaaagttgagaaaatacagtagctagatcaaagagtcccaagactggtgccgtataataatgcctttacaatcataactatctttttcctcagaagctactaattccgtttaagaatgcccaaaatgtcaattttcttactcaagcttctgcaaaaatatttgcctaatcggtgctttgcagttagagaaaatgtgtctcacatctttgtctgtacagctagcttagcatcacgaacaacgatttggtttgatgtagtaggcggaaatggttaactccaatctaggaacaagatttttcaataactgggtattcagtgggcatccattgatcagtttaacatctttcgctgtgttttttaattagatgtagtagaagtgagttggactccagtatgattctgaaaaatacagttattttgtgcttctaatgttgctgtaaaagaaactctttcgtgttttccattcttattgctatttcatcactagttattcctttatgtgttttcatttaatttattttgctcgacagtgctttttttctattctgtaaaagtttaattcacttgtatctgtggtaaaattgagcaacatatcaaattctcaaattatttgcgagatacaattgccttgcacatcagattgaacattgtacaccagagaatgtagagagttgccaattagccaagaatcaaatgacctatttctagccaaggctattttttcatggcatcctggtactctctgtcacatggctccttacaattggctgtggctttgttttaactcatgtatttatcgctaaggatccttgcaatgaacttttgtgttttcttttctctttcatttccaaataatcaggaatggcacacaaggtgcattttgaaaattgccactataaatatttgtgggccgggagtggtggctcatgcttctaatcccagcattttgggaggccgaagtgggtggatcacctgagatcaggagttggagaccagcctggccaacatggtgaagcacagtctgtacgaaaaatacaaaaattagccgggcatcagggcaggtgcctgtaatcctagctactcagaggctgaggtaggagaatcgcttgaacatgggaggcggaggttgcagtgagacaagatcacaccactgcactcccgcttgggcaacaagagtgagactccatctcaaaaataaatgaataaataaataaataaagatttatgatcaagtaactaattacctggacatcctctcctggcataagaaacagaacctatgaagccaccctagactgttgcccaatcctatccaccaaaaggaacctctatcttgagtcttgtatttactagtcctttgcactgtctctaaagatttttacaataaatatatatacccaaatcacagtctgacctgtttttttaacttccctgtacagcgaactcacactatatgtattctcctgtgatgcacgttatgtgtaggagagttatctctgatgtgggaaggtgctgttcaatcatttttactgctaaaattttacttttagggattatatcacaattttgttaattcccattgatgcatatgtgattgtttccagtttttttgccataaacattggtgtacacgtctctgggacacatagccaaaaatatccccagagtgtatgatcaggagcaggtggtgggattatacagtgtatggaccttaatcatacaagataaggctaatttgatttcccaagtgcttgtaccaagaatgggaaagaacttatgttgctcatgtgttctgaaaacactcagttgaaggtggagattacatgttaaaaaaccactgtcttggctacagaatcaccctaggcattttttcatattccattaataacttccttttctttacttttatcctgtaaattatggcattatactttaagcataagattcaaataatgcttctttttagcctaaccacatagagtttgtgaaaaagtggagggagggagaaagctctgagggaggaaaggaggaaagaaagatggaaggacagagaaagacaaaatgaacattttcaaaaaagaataggaggaaaggattagaaacagcaagtgtggctaatattattaaaatgcagggaattaaaagatgtagataacatccatggaataacagaaacttaagaaagccttaatagttattaactgctgtgtcacaaactacctcaaaatttagtggcttaatacaacaaatatctgttaatttcaaagagatactacaaacgcgcacaaaatagattttatgggggtggcagaagttggataaagagatggattttacaggttggaataagtaagagttattggtgtgcacatggcaatgctttttagtccaagtcctccgaggagcagatgccaagatgagcttaaagtctacggcatcttatgaggggacacacctgtaagggaatatgagaagcgagccagaaatccctggaaaaggcggcagacaatgatgcaagtgtgaccccaagtgctggacagaaggagacaaggtctgttcgacgcatcctagagcagaggcagtctaaggagagttgaggaagggcatggaggagtcctggagccacatttggccatcagaggagtcccatgtctcccagtaatggcctgccttagtgtgcttgctgtgaccagtcactggctgggaacaactcatggaagcagggcttctgcactaatcctgctgaggatgtcagagcacagaagcagagacttgggacattacctaggagtatcactcaatccttccttcctgagggttctgggctcttgaatatcaaaccctctcaggctgggttgctggatgattctgctcacacaacggacaagggaaaccaggatgtccccaagtggattcctggtttccacacacacttctcctgccctcattgtgtgatagcagccctgcctcctcctcttctcacctgcttgtctctgggcacatactattcaaatatccctgggtgcaaccacaatgtgtagttccatggactctcatttgtctccttgcgagggtgtcctctttgggaaaccaggacctcctaccctgcagagtccagattttggaagtaagaggagcaaaatcaccctgggggtgaatataatgaataaaatacatacatacatacgtacatacatacatgcataaatttatttatgtattgatgttatttatgtatttatttatttacttataagtaaatcaccctgggggtgaatataaggaatgagacacacctgctttgacttcttggtttttggacccacgtattcttccttctgaaaacagtgccttagagacgtctttgattcaatacatgcatcacatcctgaaagatggcacccattcctcagaggatttcatccaagctggtactgagttgtgcctgtagagtcctgtccatgactctgtgtgcctggcagcacttgagaggcgcaggtggtgatacgaccaggggatcccatggtcaggacccacacttcatcctcttctccaagaggtgtgtcccccaggcagataatgtactgaaattctgagccagtggatcaggaatgccaatagtagtgttgactgagggtctgagagcagagaggaaaaccacaccacatcgaatccctgtgagcctatccctgtgaggataaacttctgccccttccaggatggatggtgttcaagctattcaacttgtcacttaggggctagtcagttactttaagaaatggtgccctatcagtgcctatcattggtctgcaatgctcatgagcagagtattcagaggaagcagtagctgggtgggccttggtagtggagagacagtgctgctggactcatttgtagcctcattcttgccactgtggttgctccactcatgggttcttcctatcaggcctgggctgatccatgatgcagactggctaacttcaatttgtcttcaatttgtttgattattcagggccacatcaggactgggtgttttctgtgggtgttaacatggaattgaggctcaaccgacatggaccattttcgtctcatgatagatgccgctgggcctgtccaatgaatgactctatgggtcacatagaagccaatacacacgggcacttggaatcacatggttgcttggtgtcctatgcgcaagcattctatcttatcagggccagtaacatgctaaaagttgcttctaacatggagcatgtttctctgctgtggactccatggccttactcctgatcccaggccctgcattctgactttcccactgatgcttggttgagctccatcctgcttctttccccagaccgccacctccagcaccaggggtctgagggatggtgactgactgcaccacagcctgggtctgctgcagtgtcctttccagtccaggccccactcaaagctggcctcctcctatatcacccagagtgtcagccaaagcaataaacttagatgtggaatgtggtgttgccagaacccagagaggctcatcaagtagtgtgcttccttccttctggtgaggatgcaagatgcaagtttgtcttttactttgtggtggggggggggcggggagctctgcatgcccctaaccactggacccataacacttcactgcagtggccactcttgaagctctgtaaggtttatcttcaccttctgtagtgcacatgttttgccagggaattcagcgtactttcctgctgttgttcatccttcccaatttatgtgatattgccaatgaaatgaagagatttagtattcattgggatgtctgatttgtccaggtctcttaaggtgatatttatagaaggttgaggagttaaggtagccctgatgcaagctatcaataaatgtattataaatcccatgtgaatgtgaatcattccatatccatcttctaaatgaaatgggagggaatgcactcaccaaatccacagctgcttgccatgtgcctgaggccttattaatctccccaggcagtgatatccagccagcatggcagctgcaatcaggactcctacttggtcaagtctggagtaattccattcattctttagccatatcaggcttctgcaggtacagattgctgagttatatggagataacaggcaatcccaacaacaccccgcatcgttcaggtctgtaatggcagtgccacccctataatacctgcagtaccctccacaagacccaccctggggcacaatattgcttctggtttggcttgtatgagggatgtttccctttgggcttcagcacaatgagatcccttactctccagactagggacacagtgtggggtgactccagttgccagtgcatcaaggccaattatgcactcagagaatggggagataaccaggacaggatttatggaactggtgattccaccatggggcataatttgtctaggtttattccctggcctctgtaagccccagtgtgatgggggacataatggtgctgtgggaatctgggcagcaatgtcagctcacacccaatgttaatacttatcccatctcctgattaaatggctataggctcctttgcagaagggctgatggaattgtcccagcatgtaaccatcatcgtgtcccaaggttctttctcttagggatatagatatgtccttagtcactggattctgaatctgaagcttgctcctcaattccacatgcttatcatagatatcaagcagtgaccttgctgtctgcccatcttttctgaccctgggacaccaccctttattaaccttccccacaactccttgaaggtcaagcccccttggctgatactctgggttatcacagtaaatgtgccctttatcttttgcaggtcactgaaaaggagggttcctaaagcattcactcctgaccctgagggaggtgggtgcactcactccaggactcaggttcaccacagataagcaaaaaagtcctcacattcaaaattgtcctgggccacatgcagcccacgagccgcgggttggacaagcctgcatctagaacgtatgcaccataaccccagaaatttttctgtttttactttaaggatgctttctaaatgcaaaagcagtcatatccctagcagacaacaaatgtcagttgaatgaatgaccactgtagagcatctccctattctaaagcccatacctttattaatgtagccacagggcaaatgctgttttgtggcagctaaagaacataagttcacatggacatccacgccgccagtgcttttctcaccagggctgcttgtgtgtcctccctcctcccacaccaaccctcctgcacacttcagcacaaaaccatatatttctcttcaggaacaataaccctagccttatgggtacaattttccaaccacatatgaatctaaattagactctgctttataaatctatgagtttggattggagccagcactaggattactacaattcagagcaggaagaagagtaggagggcagaacaggagttccaacagaaagttaatcatgatgagaaactatgggaccactcctctctgcaaatgtcacaatctggttcctttaaaaagattggagaaaaattgaaaatacaattgaggaaaaagccctgggaggaaggcaagacctagacaggtctgaaaatttgtctcttgataccgcaaggagatttgtatgcagggaccaccctaggtgacatccaactccctgtgatcacaggtcttagtgggacaaggttctactgaagggccaaggacaatggagcagcaaagatgacccagccaagcagtgaccacataaagcccatagtggccggaacagaaactgggcacagccccatctactctcctcccctgcaacaaatcagcataagcaacacgtggactctggaaggttctcatgtgttccatttattttgtctctcaaattttaggaatcttctcctttaattaactcatcaacctctcatggcaagaatttgagaaagtaaatttatactcaggttctaattttaatagggaaggaagaagttacagctcagtgcaccatgaagttgagacagagatggagacacctcagccccacctctctggaacaggaaagatgattggggagggagcacaggtcagcgtgggaagagggtcatggtggacatgggggtggggtggtctccccacctcctcacattatgcctacacgaacacagacacatgcaggtgcctttgcagaaacaaagtcagggttcttcaagtcacaaagggaagggcaggaacaactcttgcctctcagtcccacacaaggcagctgtctcacactatagaaaaaaatattcatgaacaaattcgtatctgtcacagtgaggggtcacactttaaacagcccatcgcatgctcaatacatccaatggaaagaaaccccatagcacagctgtgtccactgttccgcccaacacccaacacacatcaggccctccaggctctcacctttacaagctgtgagagacacatcagagccctgggcactgtcactgcctggggtagaacaaaaacagaacctggtcagatcccacagaagatgtggctagaggaggaattgtggggtgggtgagctcccccatgggctcccaaacacaatatcccaaggacctcaggcatcagcctccttcatacttacttgcagcctgagagtagctccctccttttctatctgtgggaagaaaatgtcctgtgagataccagaaaggagtcagggccttaaggtcctagaggaacctccaagtcttggacctcagagaagtttccagaaatgtgtgactgcagacccagggcgggatcaggaaacatgaagaaagcaggtgtgggtcctggaccaaccgccctcctgaaggtcctcagggaccttcccctgtgacttgtgactgctgggatcaggtcccatcaccgctgtaatcaaggtgataaatctgtccttcattttaacaggtgctttacaaaagagtaagtgctggcacacagggcccaggctgggtaggcccataattgtgggtggtgcttcccagtaacgaggcagggcacacttctacctgggtcttggaaccctcagtgagacaagaaatctcagacccacccttcaccccttccccacctgagctcttcctcctccacatcacagcagcgaccacagctccagtgatcacagctccaaagagaaccaggccagcaatgatgcccacgatggggatggtgggctgggaagacggctctgggaaaagaggggaaggtgaggggccctgaccctgctaaaggtcagagaggctcctgctttccctaaaagacatgacacccccgtctccctccttaccccatctcagggtgaggggcttgggcaaaccctcatgctgcacatggcaggtgtatctctgctcctgtccagaaggcaccaccacagccgcccacttctggaaggttccatcccctgcaggcctggtctccacgagctccgtgtcctgggtctggtcctccccatcccgctgccaggtcagtgtgatctccgcagggtagaagctcagggcccagcacctcagggtggcttcatggtcagagacagcgtggtgagtcatatgcgttttgggggcgtctgtcaggaagagtcagatcattcaggcattttgcatctgtcatgggacactcctccagcacacatgtggctatcttgagaatggacaggacacctgggatggggaagggagcacagaacccagacaccagcctggacacaggcacctgggataatctcctattccgtggaaaattctagtccctgaagagggaacagcgacttctggtcctgacctgagtggaggctgaaggactcagaagtgctggactcagacccccacacacattgagtgtgaagcagagaacaaggcctgagaggaaaagtcacgggcccaaggctgctgcctgtgtgtgtcaaagggaaccactcatcagtattcgagggatcgtcttcccgtcattccttcagagattttatcccttaattgtgtcagagagcagggcggaacctcagagtcactctctggtacaggatctggaaacccaggaggattcctctccctcaggaccagagggagggcgatattctagtgttggtcccaattgtctcccctccttgtgggaggccagcccgggagatctacaggcgatcagggaggcgccccgtggcccctggtacccgtgcgctgcagcgtctccttcccgttctccaggtatctgcggagccactccacgcacgtgccctccaggtaggctctcaactgctccgccacatgggccgcctcccacttgtgcttggtggtctgagctgccatgtccgccgcggtccaagagcgcaggtcctctttcagggcgatgtaatccttgccgtcgtaggcgtactggtggtacccgcggaggaagcgccagtccgaccccacgtcgcagccatacatcctctggacggtgtgagaacctggcccggaccccgcggtcagcccggtcccccgagccccgccccgccccgaccaacctggggggatttttggcctaaactgaaaatgaaaccgggtaaaggcgcctgggcctctcccggggcaagggtctcggggtcccgcggcttcggggcggatctcggacccggagactgtgggcgacctggcccgtccgtgggggatgagaggtcgtgacctgcgccccgggccggggtcactcaccggcctcgctctggttgtagtagccgcgcagggtccccaggtccactcggtgagtctgtgagtgggccttcactttccgtgtctccccgtcccaatactccggaccctcctgctctatccacggcgcccgcggctccatcctctggctcgcggcgtcgctgtcgaaccgcacgaactgcgtgtcgtccacgtagcccactgcgatgaagcggggctccccgcggccgggccgggacacggatgtgaagaaatacctcatggagtgagagcctggggacgaggagtggctgagacccgcccgaccctcctcccggcgcggcttcccgggtcctgcgcccccgccaggcgggcccgttgcttctccccacagaggccgtttccctcccgaccccgcactcacccgcccaggtctgggtcagggccagagcccccgagagtagcaggacgagggttcggggcgccatgacggccatcctcggcgtctggggagaatctgagtcccggtgggtgcgtgcggactttagaaccgcgaccgcgacgacactgattggcttctctggaaacccgacacccaatgggagtgagaactgggtccgcgtcgtgagtatccaggaagaaggaccctacataggttgggagagggagaaaagaaactgcggagttggggaatccccaaggctgggactccccaatccatacaccgccttcggggcctgagaccctgagagccacgcctggggccctgggacttcgccctgacccctctgcttctgtgccaagcgctctgtctcaatgtctccctgagtcttggcccaagagctgtctgagaaacaagggagaaaccctcggcatgggccccgtccctctcctttcactttttatcccgtaatctctgtccctgaactggactccctgactcccactccttacctgtccacctggactcttctagaagaaaaatcatcccatggagtttggtgccagagagtaagcttgctctgggaatggaggtgtagatttttgttgttgttgtttttgtttttaatcgggaagagttgcgcctgagtgcatgagacagaatagagaccaatttgctctttgtttattaactacagtgggtagcagaatcttggtaacccctgaatgatcaggaatctaataggtaaaaaatgtgactttggccccttgatgtataaatgtgtccaaaagccttacaacaggactcacaaagctactaagttgcattttcccagacaatgtatctgtgactcctgcttgtagtattttaaatttaccatcattccatagctctgagtttctgtgtgagtccaggacatctcctcaatacaaagtagcgactgtgttcctatatgttgcaaccagaagccattacaggctttattcacctcaaagttgcaactgttcaatgcactcacaatgcccctcactagtgctcatgcactgtctgtttttaggaagtatccacttctaagtgttgtgtatattttataggaacacttagtattttttaaacctgattaacataaaaaattagtttttaggcagacccacatgaggtattaaaagacaactgccaaggacaccctgctaggctctgtagatggatgtattaaaatccataaaacaatgtatttaaacctaagaattctgctgctttcaaattctttcctctgctccttttcctcacctcctgcttctccagcccttccctccgtccttctcatccttcaggccctcctgtccccttagtccccaccacactgtcactcatgaattgtgacactagcactgtcccatgacctgctacgtaactgtttttttcacagtggtcctgctcctgtgagtcggagtgtgttatttctccacttaaaacactccagtgtctccacctcggtcttgtgaagcttctggagtgtcaggcacttgagcatatgaggggatacctggttcattgtagggactaagttaatttttgttgatttaatgaatgaaatatgagtgtattaaattgcatcacagataattataaactgtaaaacactgaaaaagttcagaaagattttattttatgcaactagtgtgtatatcaattcattcgcacactaccacgcctggcgaaacaacacccatttatctgcttatagttccttggtcagaaatctgggcaagatgtggatagaatctctgttctgggcttccaaaagctgtgttttcattttgaatcctccttcaggtttatacagaggtggcggaatgcagtttctggcagttgtaaagactgaggtccctgttcctggctagctgtcagtgtagagaactgggaggggctcaattcccggtgctcaccagcattctttcctacacagccccttaattttttttttttttttttttttttttttgagacggagtctggctctgtagcccaggctggggtacagtggcccaatgatctctgctcactacaagctccacctcctgggttcacaccattctcctgtctcagtcccaagtagctgagactacaggtgcccaccactacactctgctaatttttttttttttcttagtagagacagggtttcaccttgttagccaggattgtctcaacctcctgacctcatgatccacccgcctcggcctcccaaagtgtcgggattacaggcgtgagccaccgcgcccggcccatagccctttccttttcaaagcccatggtggaggaaacccctcatgctgagtccctctcacactgtaagtctctatgctcatgaagaacccagtcctttcaagggctcacctgattaggacagttcaagcaggataaacccagcataaatcaactaattgagacccttaattatatctgctaaatcccttcacagcagcacctatattagagttggttgaataactggaggaaggtgaatgaccaggagctgcttgttgaggccttcatagaatcagcctagcaagggttggatcttccttttgtgtttaattgggacacagttggaaagtgaagttcaagtaaagtgatcattgtgaacggtcataaaatacatcctcttcagccatggaaattgtccttaccttttaaaactaagttacatgtttaatatcttataattaatttaggccaggtatggtggctcacgcctgtcatcatagcactgtggaaggtggagtaagggagatttgttgactccagaagttcaagatcaacctgggcaaaacctccatctctacaaaaaattagaaaattagccaggcatggtagttcatgatggtagtcccagctactcaggaggctgaggtcagaaggtcccttgaccccaagagttcgacactgcagtgcatggtgatcatgccactgcattccagcctgggtgacagagcaagaccctgtctcaaaaataataatgatgatgatgacacatttagagcaaatgcaatttgatgtgtaataatacatcttctcttgtgaaaatgtattatttactattgcataacaaattacgtaaaacttagctcgaaacaacaaatatttctcatctcccacagtttccaattgtcaggaatccaggaaaggtttccctgagtgcttcctgctcagggcctctcaaaaggctgcactccagttgtcagccaggggccgcagcatccaagggcttcgctggggctgggaattcacaagaaacatggatcagtcacatggctgttggaaaaggcctggttccttgttgtctgttcccagaaggcctcagttctcagtcatgtggaccttcctgcagggctgcttatggcagagcggctggcttcccccagagctcatgatcccagattcagagagagagaaggtggaagccgcagttagttttatgttctacacccagagtcacaaactgttatgttggcactattctataagttagaagttgtattagtccattctcacactgctataaagaaatacatgagactgggtaatttataaaggaaagagatttaattgactcacagttctgcatgactgaggaggctgccccaggaaacttacagtcacggcagaagtggaagcaaacccgtccttcttcacgtggtgacaggagagagaaatgcacaatgaagcagggaaaagccccttataaaaccatcagatctcatgagaattccctcagcatcaggagaacagcatgggggcaccgtccccatgatccaatcacctcccatgaggtccctcccccaataggtagggattacaatttgcataacaattcaagatgagatttgggtgggaacacagaaccaggccatttcagaagtgcctcattaagtccaagccacactcaagagagggaattaagctgcacctctagaaaggaacagtatcaaaggatttgaatatacgttaaaagcaaaattataactattgtttcaggtttctgaaaatcaaagtcttcttgtatctaattatttttcattaactctttaagcttgtcttttaatttaatttttttttaagttccagggtacatgtgtaggatgtgcaggtttgttacataggtaaatgtgtgccatgttggtttgctgcacctgtcaactcatcacctaggtattaaccctggcatgcattagctatttttgctaatgatcctcccatcaccaccctcccccaactggccccagtgtgtgttgttcctctccctgtgtccatgtgttctcattgctcagttcccaattatatatgagaacatgtggtgtttggttttctgttcctgtgtgagtttgctgaggatagtggcttccatcttcatccatatccctgcaaaggacttgatctccttccttttcatggctgcataatattccatggtgtctatgtaccacattttctttatccagaccatcattgatgggcatttgggctgattccatgtctttgctattgtgaatagtgctgccatgaatgtaaacatgcatatatctttataatagaatgatttacattcttttaggtatatactctgtaatgggattgctgggtcaaatggtatttctgattctaaatctttgagggatcgccacactgtcactgtcttccacaatggattaaccgatttacttttccaccaacagtgtaaaagcattcctatttctccccaacctcaccagcatctgttgtttcttgactatttaataattgccattctgactggcataagatggtatctcatttgtcgttttgatttgcatttctctaatgatcagtgatggtgagcttttttttttcatatttttgttggccacatgtatgtcttctttagaagtgtctgttcactttctttgtccactttttaatgaagttttttttcatgtaaatttgcttaagttctttgtggattctgaatagtagacttttgtcagatggatagatggcaaaatttttctcccattctgtagcatgtctgttcactctgattgatgatagtttcttttgctgtgcagaaaaaaattgcctaatctgattgcttttcatttacaaaaatgtgaatctcatacttcagtaaacacatctagcttagcatgatgccaataattttggcttgatgctgtagcccgaaatggttagctcgaattgagagacaagttattttcaaaaactggctattcaatgggcattctataacaaacttaacatcttttgttgtggtattgaatgagatgtgatagaagtgatttggacaccactgtgattctaaatagcactgctattacgtgcttctgaattttttttttctttttagcagtcttattctgtttccattcatatttgctattccatcactgggtattccttcctacgcttttcatgtttcatttattttgatcagtgatgtgcatttccaattctgtaaaagtttaattcagttgtatgtgtggtaaaatgtaacatcaaatctttgcaagatgaaattaccttgcacagcatattgaacattgtattattgaaaatctagagagacgccagtgagccaaggatcgaatgacctatatgtagccaaggccgttttcatggcatcctggtcctctctgtcacatagctccttacaattctctgtggttttcttccaatgtaagtagttcttgttaagaatctttgcaatgaactttgaaattcttttctttttcatttctataaaaaacaggtatattttaatttggaaaactctgtttaaggaattataatcaagtaactaccagggtgcccagcactggtgtaaaacacgaaactgtaaaacaaccctgggctgctacccagtcatcctccagaaggagactgttgggaacaagtcccccaaaatctggtcataaactggccctgacactggccataaacaaaatctctgcagcaccataacatgttcataatgcccttagcacccaagctggaaggttgtgggtttatgggaatgagggcaaggaacacctggcctgcccagggtggaaaaccacttaaaggcattcttaagccacaaacaatagcatgagtgatctgtgtcttaagggcatgttcctgctgcagttaactggcccaacctattcctttaatttggcccatcccttcgtttcccataagggatattttaactaatttaatatctatagaaacaatgctaatgactgtaataaatatgcgggtaaatctctgttcggggctctcagctctgaaggctgtgagacccctgatttcccacttcacacctctatatttctgtgtgtgtgtctttaattcctctagcaccgctgggttaggatctccctgactgagctggtctcagcagaagactccatgctgagtcttgtgatacttattcctttgtatttcttcaaagatttgtgcaatatgtatatgtgtatatatatatatatatatatatatatatatatatatacacacacacacatacatatatgtgtatatatgtgtatatatacacatatatgtatatatgtgtatatatgtgtatatatacacatatatgtatatatgtgtatatatgtgtatatatacacatatatgtatatatgtgtatatatatgtgtatatatacacatatatgtatatatgtgtatatgtatgtgtatatatacacatatatgtatatatgtgtatatgtatgtgtatatatacacacacatatatatatgtatgtgtatatatatatatatatatatatatatatatatatatccccaaaacaaatatcagttggttttgctggtttttaagcttcctgtacagcaagttcctactgcatttattttcccatgatgcacattatgtgtaggagttatctgtggtgtgggaggctgtcattcattcatttttactgctgaaggcttacatatggttataccacaatttcactagtttcctattgatgtatatgtggctgattccagtttttgccataaatattagtgtgcgtgtctcctgtgcacataggcaagaaagccccccagagtggatgattaggaatggattggttggatgataggttgtatggactttaaccatactagataatgataatacaaattccaaagtgattgtggctacttaaacttttacaataaatgcgtaatacttgatgttgatgatgtgttctgaaaacactgcgttgaaggaattgagttaaaagccactgtcgtggctgtagaattatagcgggcatttttattcagactctgttaataacttcctgttgtttacttgtttctcatatacatgacattatatttttgacatatagattcagaaaatgcttacttacagcccaatcacatagagttattttatatattaggaaaatttcataataaaaaggaaaaaatggaggaagagagagaaagaaggaggaatggaggaaaagtgaaagaagaaaagaaggaaggggaggggaaggaaagggagaaagaaggagggaaggcgataggttgaatggaaatagagaagaaagagatggagggagggctagaaggaaggggaaagtgaaggaagaggccaggcgcagtggctcatgcctgtaatcccagtcttttggaggccgaggcaggcagatcacgaagtcaggagatcgagaccatcctggctaacatggtgaaaccctgcctctactaaaaatacaaaaaattagccgggcatggtggcaggtgcctgtagtcccagctccttggaaagctgaggcaggagaatggcatgaacctgggaggcggagcttgcagtgagccgagatcgagccactgcactccagcctgggcgacagaacgagactttgtctcaagaaaaaaaaaaaaaaaagaaagaaaaaagaaaaaaaaaaaaggatggaacaaaggagaaaagaaactaaaataaagaaaagaataggtgttgagaaactagaaaccctatgtgtggctaatattatcaaaataggagaaaataaaacagatgtagttaacctctagagaataatggaaatgtaagagggcttcattagttatccattgctgtgtaacaaactacccccaaatttagtgacttgggatcactaaatgagggatcgtcttccagtcattccctcagagattttatcccttaattgcgtcttcccgtcattgcctcagagattttatcccttaattgtgtcagagagcagggtggaacctcagagtcactctctggtacaggatctggaaacccaggaggattcttctccctcaggaccagagggagggtgatattctagtgttggtcccatctgtctcccctccttgtgggaggccagcccgggagatctacaggcgatcagggaggcgccccgtggcccctggtaccagtgcgctgcagcatctccttcctgttctccaggtatctgcggagccactccacgcacgtgccctccaggtaggctctctgctgctccgcctcatgggccgcctcccacttgcgctgggtaatctgagccgccatggccgccgcggtccaagagctcaggtcctcctttagggcgatgtaatctttttacagagaatcctttttacagagaatggggagataaccaggacaggatttatggacccagtgattccaccgtggggcataatttgtccaggttaattccctggcctctgtaagccccactgtgatagggacataatggtgctgtgggaatctgggcagcaatgttagctcacacccaatgttaacacttatcccatctcctgattaaatggctataggctcctttgcagaagggcttatggaattgtcccagcatgtaacagtcatggtgtcccaaggttctttctcttagggatatggatacttcctcagccactggattctgaatatgaagcttgctcctcaattcttacatgcttatcatagatatcaagcagtgctcttgctgtctgcccatcttttctgaccctgggacaccaccctttattaagctttcccataactccttgaaggtcaagcccccttgactgatactctgggttatcacagtaaatgtgccctctatctttttcaggtcactgaaaaggagggttcctaaagcattcactcctgaccctgagggaggtgggtgcactcactccgggactcaggtgcaccacagataagcaaaaaagtcctcacattcaaaattgtcttgggccacatgcagcccacgagctgcgggttggacaagcttgcatctagaacatatgcaccacaaggcccgaaatttttctgtttttactttaatgatgctttctaaatgcaaaaacagttatatacctagcagaaacaaatgtcagttgaaggaatgatcatagagaaccactctattctagaggcaatatctttattaatgtagcctcaggacaaatgctttatttttgtggcagctacagaacaacatcatctcacactgacatcagtgccaccagagcttttctcaccagggctgcttgtgtgtcctccctccctccctccctccccccacactaactctcctgcacactgcagcacacaaccatatttttctcttcaggaaagataaccctaggcttatgggtccaattttccaaccacatatgaatctaaactagactctgctttataaattgatgagtttctattggagccagcactaggattactacaactcagggcaggaagaagagtaggagtgcagaagaggagttccaacagaaagttacctatgatgagaaactacgggaccctgcctcttggcaaatttcagaatctggttcctttaaaaagattgcagaaaagatggaaaatacaatgaggaaagagccctgggaagagggcaagagcttgaaagatctgaaaatttgtctcttgataccacaaggaccctggaatgcagggactgccgtaggtgacatccaagtccctgtgatcacaggtcatggtgggacaaggttctactgaagggccaagtgtgggtggaggattactcaggtgcagaggcaagagactgaaggcgcaaactgttttagtataataaagaaaatagttagaataagaatagtcataatacaaattagatatagagatgatcatgaaaaattatcaatcattattataaacattattaatcattagcttttaatattaccctttgttgcattactaagataacctaggaataaccggcgggcatagggtcaggtgctgaagggacattgtgagaagtgacctagaaggcaagagatgagccttctgtcacgcccgcataagggccgcttgagggatccttggtcaagtggcaatgccaatgtctgggaaggcacctgttacttagcagaccatgaaagggagtctccctttcttggaggagtcggggaacactgctccaccagcttcttgtagaaggctggatattatccagagctactcgcagtcatccagaggcctaaacccctccctgtggtgctgtgcttcagtggtcatgctccttgtccactttcatgctcctcctgtactcctggttcctctttgaatttcatagtagaaaatggtagaagaaatagtgaaagtcttaaagtctttgatcttaagtgcagaaaagaaaatggtgacatatgctacctaaaagggaagggccccctatcctgtaatcacgtgacttgcttcaccttgtcaatcagttagaagattcaccttccttaccctgccccttgtcttgtatgcaataaatatcagcgagcccagctgttcggggccactaccggtctccgcatcttgatggtagtggtcccccgggcccagctgttttctctttatctctttgtcttgtgcttttatttattacaatctctcatctccgcacacggggagaaaacccgctaagccccgtagggctggatcatacagccaaggacaacggagcagcaaagatgacccagctgagcagtgaccacataaagtgcacggtggcctgagcacccactgggcacagccccatctactctcctctcatgcaacaaatcagcataagaaacatgtggactctggaaggttctcatgtcttccatttattttgtctctcaaattttaggaatcttctcctttaattaacccatcaacctctcatggcaagaatttgaaaaagtaaatttatactcagattctaattttaatagggaagtaagaagttacagctcagtgcacataaagttgagacagagatggagacatctcagcctcacctctatggagcaggaatgattaattattggagagggaacacaggtcagcatgagggaagaggatcatggtggacatgggggtgggttggtctccccacctcctcatattatgcctacaggaacacaggcacattcaggtgcctttgcagaaagtgagtcagggtttttgaagtcacaaagggaaggcgtgaacaaatcttgcctctcagtcccacacaaggcagctgtctcacactataaaataaaatattcatgaacaaattcatatccgtcacagtgagggatgacactttaaacagcccatcacatgttcaatacatccaattcaaagaaaccccatagcacagctgcatccactattgcccccaacaccccccacacatcaggtcccccagcgtctcacctttacaagccgtgagagacacatcagaaccctgcgcatggtcgctgcctggggtagaacaaaaacaggacttggtcagagcccagaggagatgcggctagaggaggaatctggggttgggtgagctcccccatgggctcccgaccacaatatcccaaggatctcagggatcagcccacttcatacttacttgcagcttcagagtagctcactctatctgtgggaagaaaatgtcctatgagaggccagaaaggagtcagggccatacggccctaaacaaaccccctagcctttgatcccagagaagtttcctgaaagtgtaactgctgatccaggacaggatcaggaaacataaggaaagcaggtgtgggtcctggaccaactgccctcctgaggtctgtcctcagcagggaccttcccctgtgacttgtgactgctgggatcaggtccccatcatcataatcatcaaggtgataaatctgtccttcagtgtcacaggtgctttacaaaagagtaagtgctggcacagagggcccaggctgggtaggcccatgagtgtggatggtgcttcccagtaaccaggcaggacacacttctaactggggcttgaaaccctcagtgggacaagaaatctcagaccccactcctcatccattccttacctgagttcttcttcctgcacatcacagcagaaaccacagctccagtgactacagctccaaggagaaccaggccagtaacgatgcccacgatggggatggtgggctgagaagactgctctgggaaaaaaggggaaggtgagcgtccctgaccctcagcccccagcaccgaccctgctgaagttctccagagaggctcctgctttacctaagagacatgaccccccctccactaatctcttgccttaccccatctcagggtgaggggctcgggcaacccctcatgctgcacatggcacatgtatctgttcctctccagaaggcaccaccacagctgcccacttctggaaggttccatcccctgcaggcctggtctctacaagctccatgtcccgagtctggtcctcttcatcctgctgccagctcagtgtgatctccatagggtagaagcccagggcccagcacctcagggtggccttatagtcagagatggaatggtggatcatatgtgtcttgcggggggggtgtctaacaggaagagtcagaaaattcaggcactttgcatctctcatgagacactccagcagcacgcatgtggccatcctgagaatggacaggacacctggggtggggaagggagcacagaacccagacaccagcctggacacaggtacctgggataatctcctatccgtggaaaattctagtccctgaggagggaacagtgacttctggtcctgacctgagtgcaggctgagggactcagaagagctggactcagacccccacacacattgagtgtaaagcagagaacaaggcctgagaggaaaagtaacggggcccaaggctgctgctggtgtcaaagggaacccctcatcagtattccagggattgtcttcccttcatttcctcagagatttcatcccttaattgtatcagagagcagggcagaccctcagagtcactctcttgtacaggatctggaaacccaggaggattcctctccctcaggaccagagagaggacgacattctagtgttggtcccattttccttctctctttgtgggaagccagcccaggagatctacaggcgatcagggagacgtcttgtgttccctggtacccgtgagctgcagcatctccttcccgttctccaggtgtctgcgagcctctccacgcacgtgccctccaggtaggccctgatctgctctgcaaattcttctgcctcccacttgcgcttggtgatctgagccgccatgtccgccgcggtccaggagcgcaggtcctagttccgggctatgtaatccttgccatcgttggcgtgctgttcatacccgcggaggaggcgccgttccagccccgagtcgcagccatacattatctggagggtgttagaccctggccccgcccccgctgtcagccccgcccaccgagccccgcccccgccccgaccaacccgcggggattttggcctaaactgaaaatgaaacctggtaaaggcgcctgggcctctcccgggtcgaggatctggcgggtcccgcagcctcggggtgggtctcggagccggagactcgcgggggggacccgggacgtccgtgggggatgaggaggggtcgtgaccttcgccccaggccggggtcattcaccggcctagctctggtggtagtagcggcgcggcatgggcaggttcactcttgtcagtctgtgcgcgggcctgatgttccgtgtgctccggtcccaatactccggtccctcctgctccaaccacggcgcctgcggctacatcctcggagtcgccgcgtcgctgtcgaaccgcacgaactgcgtgtcgtccacgtagcccactgcgatgtaccggggctccccgcgacccggccgggacacggcggtgctgaactaccttatggagtgggaacctgggggcgaggaggggctgagacccatccgaccctcctccttgcgctgctccccgggtcctgcgccccagtgcgcgggcccctagctcctccccgcagaggccatttccctccggatcccgcactcacccgcccaggtctcggtcagggccagggcccccaagagcagcaggaggagggttcgggacgccataaccccatcctcggcgtatggggagaatctgagtcccagtgggttcgcggggacttctggaacagggaccccagcgacgccgattggcttcgctagaaacccgacaccaaatgggggtgagaactgagtccacatcctgagtgtccaggaagaaggaccctacataagttgggagagggagaagagaaactgcggagatggggaatccccaaccctgggcctccccaatcaatacatcgccttcggggcctgaaaccctgagagccacgcctggggccataggacttcgccctgaccccgctcctcctgtgccaagcgctctgtctcaatgtctccctgagtcttggcccaagagctgtctgagaaaccagggagaaaccctcgtcatgggccccttccctcttcacttttcatcccggaatccccgtcccagaactggactccctgcctcccactccttacctatttccctgaactcttctagaaaaaaactcaccccagggagcttggtgacagagagggagctcgccgccagagaggcagctcgccctgggaatggaggcgtagagacaggtttttttttttctttaaatccggaaaagttgtgcctgagtacatgagatagaatagagacaagtttcctctttgtttattaactacagtgggtagcagaatcttggcaacccctaaatgatcaggaatctaatcggtaaaaaatgtaactttggccccttgatatataaatgtgtctgaaagcattacaacaggactcacaaagctactaagtttgactttcgcagacaatgtatctgtgactcccgcttgttttttacatttaccttcattccacagccctgagttactgggtgagtccaagacatctcctcaatataaagtagcacactgtgttactatatgttgcaaccgggagccagtacagactttattcacctcacagttgcaaatgttcaatgcagtcacaatgcccctcagcagtgctcatgcgctgcctgtttttaggaagtattcacgtctaagtggtgtgaatatcttataggaacacttagtatttttaaaacctgattaattaaaaaaaattagtttctaggcagtcccaaatatagtattaaaggccaactgcaaagaaggaacactaagtattttttaaaccttattaacataaaaaacattagtttttaggcagtcctacattaggtattaaaggccaactgcaaagaacactgagcgaggctctgtagatggatgtaataaaaatctataaaacaatgtgtttaaacctaagaattctactgctttccaattccttccctctgctccttttcctaacctcctgcttctccagcccttccctctgtccctttcatccctcaggccctcctctccccttagtccccaccaccctgtcacttctaaattgtggctctagcattgtcccattacctgctacgtgactgttctctccacagtggccctgctcctgtgagtcagagtgtgtcatttcctcacctaaaacactccagtggctccacctcggtcttgtgaagcttctagaatgtcaggcacatgagcatatgagggcatacctggttcatcttaggcactaaattaatttttgttgactgaatgaatgaaatatgaaggtattaaattgcatcacagaaagttataaaatgtaaaacactgaaaaattaagaaatattttattttatgtaactagtgtgcatatcaattcattccgagtctgttgagcctgtgtatgaattttataagattgcataacaaattatcacaaacattgactttaaacaacacccaattattgttgatttatttgtttttagagacagagtctccctctgtcatccagggtgaagtgcagtcacatgatcatggctcactgcagcctcaaactcctgggctcaagggatcttcctgcctcagtcttcagaatagataggactgcagacaagtgccaccacgcccagcaaattaaaaagaaattgtagagatgagtgtctcactgtttgatcttggctggtctcaaattcctggatgcaagtgatcctcctgtgtcagcttctcagatgttaggattgcaggtgtgcattaccacgcctggccaaacaacacccatttatctgtttatagtaccttagtcagaaatctgggcatgatgtggatggaatctctgttccgggcttcccaaagctgtgttttcattttgaatcctccttcaggcttatacagaggtggcagaatgcagtttcttgcagttgtaagactgaggtccgcgttccttgctggctgtcaatgtagagaacagggagggctgtgctcaattcctgatgcccaccagcattcttccctgtacagccccttcattttcaaagcccacagtggaggaaacccctcatgctgaatccctctcacactgtgaatctctatgctcaggaagaacccagtcctttcaaggactcacctgattaggacagtccaagcagcataaacccagcctaaagtcaactaattgaggcccttaattatatctgctaaatcccttcacagtagcacctatattagagttggttgaataatggggggaaggtgaatgaccaggagcttgttgttgaggccatcatagaatcagcctagcaagggctggatcttctttttgtgttcacttgggacatagttgcaaactgaagttcaagtaaagtaatcattgtggacggtaataaaatacatccttttcagccacggaaattctccttaccttttaaaactaagttacatatttatatcttttaattaatttaggccagatttggtggctcgcacctgcaatcctagcattgtggaaggcagaggaaggcagatttgttgactccaaagttcaagatcaggctgggcaacatggtgaaacccccatctctacaaaatattagaaaattagccaggcatggtggttcatgattttagtcccagctactcaagaggctgaggtcagagggtcccttgagcccaggaggtcgacactgcagtgcatggtgatcatgccactgcactccagcctgggtgacagagtgagaccctgtctcaaaaataataataatgatgatgataaatttagagcaaatgcaaattaacatgtaataatacatcctctcttgtgaaaatgtattagttatttactattgcataacaaattatgtaaaatgtaccatttcaaaacaacaaatattgatcatctcccacagtttccaattgtcaggaatccaggagaagtttccctgagtgcttcttgctaagggcatctcacaaggttgcagtccagttgtcagtctaggcctgcatcatctgagggcttcactgcggctgaggattcacatgaaacatggatcagtcacatggctgttggaaaaggcctagttcattgtaattgagtcccagaaggcctcagttcttagccagatggaccttcctgcagggctgctcatggcacagcagctgactttccccagagctcatgatcccagagacagagagagagaaggtggaagccgcagtgagttttaggttctacacccagagtcacaagctgttatgtcggcattgttctatcagttagaagttgtattagtctgttctcacactgctataaagaaatacctgagactgggtaatttataaaggaaagaggtttaactgactcccagttctgcatggctgaggaggccgccccaggaaacttacaatcatggcagaagtggaagaaaacccgtccttcttcacatggtggcaggagagagaaatgcagagggaagcggggaaaagccccttataaaaccatcagatctcatgagaattcactcactatcattagaacagcatgatccaatcacctcccatgaggttcctccttcaatactggggattacaattcgcatgacaattgaagatgagatttgggtgggaacacagaaccaggccatatcagaagtgcatcattaagtccaagccacactcaagagagggaattaagctgcacctctggaagggagcagtattaaaggatttgcatatatgttaaaagcaaaattcaaactattatttcaggatttttaagttaaaggcttttaatctaattatttttccttaacattttaatcttgtcctttaatttaatttagtttaattttaagttccagggtacatatgcaggatgtgcaggtttgttacacaggtaaacgggttccacggcagtttgctgcaccaatcaacccataacctaggtattaacccctgcatgcattagccatttttcctaatgctccccccaccaccgccctcccccaacaggccccagtgtgtgttgttcctctccctgtgtccatgtgttctcattgctcagctcacaattataagtgagaacatgcggtgtttggttttctgttcctgtgttagtttgctgaggataatggcttccagcttcatccatatccctgcaaaggatttgatctcattcctttttatggctgcataatattccatggcacatatgtaccatattttctttatctagtccctcattggtgggcatttgggttgattccatgtctttgctgttgtgaattgtgctgcaatgaacaaacacatgcacatatctttatagtagaatgatttatattcctttgggtatataccctgcaatgggattgctgggtcaaatggtatttctggttctaaatctttgaggaatcaccacactgccttcctcattggttgaaccaatttacatttccaccaacagtgtaaaagcattcctatttctttacaacctcgccagaatctgttgtttcttaactttttaataattgccattctgactggcatgagatggtatcttattgtggttttgatttgcatttctctaacgatcggtgatattgagctttttaaaatatgttttttggccacctgtatgtcttcttttgagaagtgtctgttcatgtgctttgtccacttcttaatgaagttgttttttcatgtaaatttgcttaagttctttttagattatgaatattagacctttgtcagatcaatagattgcataaattttctcccattctgtaggttgtctccttttcgctctgatgatagtttcttttcctgtgcagaagctcttttgtttaattagatcccatttgtcaatttttgcttctgtggcagttgcttttggcaatttcatcataaaatctttgcccatgcctatgtcctgaatggtattgcctagattttctttcagggtttttctagttttgggttttacatttaagtctttaatccatcttgagttaatttttgtgtaaggtgtaaagaaggggtccagtttcaattttctgcatatggctagccagttttcccagcaccatttattaaatagcgtttcctttccccattgcttgtttttgtcaggtttgttgaagatcacatggttgtagatgtgaggtcttatttctgagttttctattctgttctgttggtctatatgcttgtttttctaccagtaccatgctgttttggttactttagccttatagtatagttttaagtaggatagcctgatgcctccagctttattctttttgcttagcattctcctggctacacaacctcttttttggatccatatgaattttcaaatttttttttctaattctgtgataagcttctctttttaaattaatgattaaatgtttgagacatgacagagccttgggtgctgcagggaaaacagtttgagacagagaaaggagaaacaacagtatctctgcgtttctcttgtaaatacctttaataacaatgttcttcaataagttaacacagttgagaacatagagtaactagatcaaatagttccaagacttcagtgccataagaatgatgccttgaaaataagtctttgttttgtctaagatgtctcaaatttagtggaagtatgccccaagtgccaattttcttattgacatatcatcttcagaaaacatttgcctacacttaaaaaaaaaatacacacacactgctctgtctatggagtagccattcttttgtttctttacttctctaataaacttgctttcacttagaaaaaattgcataatcagattgcttctcatttacaaaaatgggaatctcatacttcagtcaacacatctagcttagcataatgccagtaactttggtttgatgcagtagcccaaaatgcttaactcgaattgagaatcaaattttttccaaaaacggctcaggggcattctattgtaaacttaacatttttgggtgtggtattgcatgagatgtggtagaagtgatttggacactactacagttctaaatagcactgctattatgtgcttctgaagctttctttttcttttttttttagctgtcttattttgctttccattcatatttgctattccatcactggttgttcctttctactcttttcttgtttcatttattttgatcagtgatgtgtatttccaattctgtgaaagtttaattcagttgtatgtgtggtaaaatgtaacaccaaatcctttgcaagaaggaattaccttgcacatcagattgaacattgtatacttgaaaatccagagagatgccagtgagctaaggatcaaatgacctattattaaccaaggccattttcatcacatcctggtcctctctgtcacatggctgcttacatttctctgtggttttctttcaatgtaagtagttcttgttaaggatccttgcaatgaactttggtattcttttctctttcatttttataaataccaggtatattttaatttgaaaactctgtttaacaaattacaatcatgtaactaaaaagatgcccagcactggtgtaaaacacaaacctgtaaagcttccctgggctgctgcccagtcacatcccccagagacagactccatcctgagtcttgtgatccttattcctttgtatttctttaaagatttgcacaataagtatatatatatatgtacatatatatatctgaaaaaaaattatttacttttgctggtttttaagcttcctgtacagcaaattcctactgcatttattttcccatgatgcacattacgtacaggagttatctgtggtgtgggaggctgtcattcattcattttcactgctgaaggtttacattttatgccacaatttcctattgatgtatatttcctattgatgtatatgtggctgattccagtttttgccataaacatcagtgtgcctgtctcctgggcacataggcaagaaagcccgctagagtgtatggttaggagtgggagggttggacgatatgttgtatggactttaaccatatagataatgataatatgatttccaaggtgattgtgtcaacttaaactcatgtgttctgaaaacacctagtcgaaggaattgagttaaaagccactgtcttggctgcagaattatagcaggcatttttattcagactctgttaataacttcctgttgtttacttgtttctcatataccatggtattatacttttgacatatagattcagaaaatgcttactgataacacaatcacgtaggggttatttaatatgttaggaaaatttcataataaaaaggaaaaaatggaggaagggagagaaagaaggaggaattgaggaaggagtgaaagaagaaaagaaggaaggggaaggggaagaaaaaggacggaaaggaggaagggagaaggagggcgagagattgaatggaattaaagagggaaggagggacagaaggaaagagaaaaagaaggaacaaaggagaaaagaaactaaaataaagaaaagaataggcgttgggaactggaaaccctctgtatggctaatattatcaaaataggaggaaataaaatagacgtagttaacctctatcgaataacggaaatgtaagaaggcttcattagttatctgttgctgtgtaaaacactacccccaaatttagtgacttacagcaacaaacattggtgaactcaaaaacataatacaaataccagcaaaatggagccaatgcaggtagaagaagttgaataaacaaaaagattttacacgttggaataagtaagaggtcactggtgtgcagacgaaaatgattttgtagtccaaatgctccaaaaagcaagtgccatcataggattaaagttacagcattttattaggggacacacctgtcagacgatatggtgagggaggtaggttaccctgggaaaggcaatagaataagatgcaagtgtgacccccagtgatggaaagaaggaaggaaggattacttaacatgtcctagaccacaggcaatctaaggagagttgagcaaggctatggaggagtcctccagccacagctggccatcagaggagtcccctgtcttccaggaatgtcctgccttagtgtcactggtgtgacccatcactggttgggaatagtccatgggaagcagggcctcagcaccaatgccactgaggatgtcagagcacaggagcacggccttggaggattacccaggagtgtgactcaaaccttctgccctgatgggtctgggcccttggaaatcaaatcctctcaggctgaattgctggataattctactctcacttgcaatggggtgagggaaaacagaaggcccccaggtggatctctggtttccacacttctgcctttattgtgtgaaagtagccatgcctcctcctggggatgaggatctattacctgggcctggagaggaggagactcctcttctcaccaggtggtctctgggcatatactgtccacacttctctggtgacaaacttaatgtgtagttcagtgggctgtcttttgtctgcttttaagggtaccctcctttgcaaaccaggacctcgtaccctgcacagcccagtgttctgagataaaacatgtcaaataccccattaggtgaatctaagagattagacatggagccatacctgcttccaccgtttgatttctggacccacatgttcttcctcttgcgaacacagaactgtagagacgactctgatttaaacaacgcaccatgtcctgaaagatggcacgcaaccctcagagtgcttcctccaggctggcacttagttgtgcctgtggaagatcacgggactccaagcaactatgtggttccaagtgcctgtgtgacccagaaagtcatagattgcacaggccaaacagcattcatcatgaggtgaaaatgatccacctgggttgagcttgaatcccatgttgacacccacagaaaacagccaagtctgaagtgtcattaaacaatgaaacagaccaatggaagctagccagccttcactatgggtcagcccatgcatgataggatgggcacatgaatggaacaaccacagtggcaggtgtgaggctacatatggggcattccttgtggctggcagcccctggggagagtagctggtgatagggttagtggaagcaacagccatggaaacactgaatctttcccttgccaagtggatccttcaggcagataatgggctaggagcactgcctagcctgcagaccaggaatgtcaacagcacccagagagtggtactggctgtgtctgagagcaggacagaaaaccccccctagaataggtacctaaccctgtgaagatgaacctctggtccttccaggatggaagtaggtaaatgtagtcaacttcttagttaatgactagtcacctaaagaaatagtgccccactagggcacatcatgggcctaaaatgctgatgagttggacattcagaggtggcagcagctggatctgccttggtagggggaagtcagtgctgctggcactcatgcctgccactgtggttgctccattcatgcacccatcctaccaggcctgggctgacccatggtgaaggctggctaactgccatttgtctgtttggttgttcagtgccacatcagacttgggtgttttctgtgggtgtaaacgtgggattcaagctcaatccaggtggaccattttcacttcatgatgaatgctgttgggcctgtgcaatttatgatgttgtgggtcacaaaggcacttggaaccacatagttgcctggtgtcctgtggtcaagctttctatcaaatcagtacaaggaacactaaaagttgcttctaacagggggcatatgtctctgctgtggatgacatgatcttactccagaatcccaggcccttcactgtgactctcccactggtgcttggttctgctccatcctgcatctttccccaccactggcaccaccagccccagggggtctgagggacgctggctgcttgcaccatggcctggatctgctgcagggtcctttcctgtgtaggccctacttgaagctggcctcctcctatgtcacctagagtgtttgccaaagcacgtacctagatgtggaatgtggtgttgtcagaactcaaagaggctcatcaggcagtgtgcttccttccttctggtgaggatgcaagatgaaacagtttgtcttttaccttggggggaacacacctgcattcccctaaacacttggcacttgttaacccataaaacttcacttcagtggccactcttgaagctctgtaaggtttatcttcacatactggagtgcgtgtgttttgccaatgactccagtgcactttctacctgctgctcattcaccgcagtcaacatgaagttgtcagtgaaatgagctgatttaatatcctatagaatatccagtatgtctagtattgtctttagaccatactatatagggcaggggagttacaatagccctgagaaaaaactataaataaatgtgttgtggatcccacatggatgtgaatcgctccatatcccctttctaattggagtggaaagaaatgcactcaccaaatccatagctgcacgctgtgtgcccgaggctttattattctgctctgcagttatatccagacaacataaaagctgcaattataattcctgcttggccaggcctggagtaatctcattcattctttagtcctcatcaggcttcctcagggacaggttgctggattatgtagagacaatagacaaccccaacaccatcccacatccttcagctctctaatggtggtgtgacccccacattactttcagtgtcttcctcaagacacaccctgggacacactatgattttttttttttttttttttgccaggatgtgggcagcgtcagaggtttccctttggctttcagcacaatgagagtcctgactccacagactagggacccagtgtgggggtgactccacttaacagtgcatcagtgttaattatgcactcagggaattggaagataaccagggctgggtctatggatccagtagttccattgtgggccgtaatgtgtccaggtttactccctgacctccgtaagccccactgtgatgggagacatgatagtgctgtgggcatctgggcatcaatgtcagctctcactcagtgtcaataatctgaccagttctgcatctttcctttcgccagtgtacaatctcctgagtaaatggctataggttcctttgctgaaggactgagggaattgtgccagcatttacttccacggagttgcagggtattcctcctagggatatggactcctcctctgtcactgggatctgaatctgaactttggctgaggtctaggcattgaggatgggatcatgactttgtattgggtcaaacaccttcaccctcctgcttctcaattcttgctttcttatcatagatatcaagcagcgcccttgttggcttcctgtcctaatcctgggacaccaccctctactatccttccccacattccctgcagcttgagtcctattggctactccttttagtttgccatagtaactctgccctctggctttttcaggtcactgccaccatttggtctttgtctcttcagggccacactctccccagggatattaataaatgcaactctgggtcatctttactaccatcacatccagcctgcagaggacaacaccccgacatttcttaatgatgcaggtccctctcaccatcacgtttctgaggctctggtggaaggtgtttcctttggaccgtcttgtggagcatggtactggtgggccttcaccatgcccacttccctcagccttgttattccatcctgtgcaagttccagggcaactaagtcacgtctaccttgttgagagttaggcatcattttttctagtctatatggattcaccccagcggtgggtttggccccccccttatcaaagtcctggggtgtttgataaacccatgccttgagaaagtgcctccaagccaaaggatttttattcttccagcttgaaattctggttccttgatcaaacaccctcaaattccaatcccagaagtgctcctcggcctcctatggggacgtgccagctagttcctgcaaagctcttcagtgggattcctgctgtatcatgggggtgagacttctgtagcatcttccagcataggaagtgggaaccattactagagaagggtgagcctcctatgcatgcccagaggatcctggagggcacccatcggataaccctgttcctgtttgcagaatctcaggtttccccaccagggtcctgactttcctgtaacaggcctgccttggctgagtggcaaacctctctggagcactgtggccctcatagtgatgtcttcagctaccattccacggtatctgccctttcgctacaagagataaagacctgtgcatgagacactgcagaggctgtcacatgtagccagtgacagctgttaacaatctgcagattctcatgatactttcacagggcatcattgcagctgagcagtaaccagccaactccactgtctttgtaggtttccccctaaccccgtcattattgtgcagggcattctatcaccccacctgccatagcttcccctaaccagggcatcctctcagctcagcactggtgagacccatagcagctcggctgcatcttgtgctatggaatttctgtgtctcccacaaccctggtggcatcctcttggcctgccaggcagtgggcaagcttttttcaaattctcatttttgcctgttttcatggatcacccttcatactacttgtgttagttagggtcccctgaggagcggaccccaatacagtattcaatgtgcaaggatttattagaggaaatagttatgagagaaattcaggacacagacggaaaatgctgggaatgtcatcagaccacaaagcaactctgagccccagtgaggtaaacagtgcaggaaggtcagctggaagcatcctagaccctgtgcaggctaacagaagttcagtaagcgtggcaggaagccctagagcttcagtcagccttcagagaagaaatgttcctgccttagtttctgccctgctttcctcagtcattggcaggaaaagacagggggcaggtgtggtctcagagcaaatgtggcaataggtttcaggattcaaaagttgaggccactatcaattctgcttactctagctgaggggctgggatgtgcattctcatgactgccacaatgatccagtggggagagaggaaaaaggttgatgataaagagaaaaaaaggtattaattgatgaactgacacctttaagtagatgataagggatgacattttgggcaccagaagagggactggctctgatgggagcagaatggtttacccacaacagtccccaacatggtaaaacacctgacatgtgttgcagctgcaaatgcatgagcagatggtgatggaatctgtcttctaatgtgttcagttttctcagtgaggtaggaaccaaggttgtcagctgagataagaatggggaaggagggttggatgtgtgagcacagagagaaggtgtgtaagggtcacccaggccaggaggaggctgagggtgagccatgcagggagagggtgattgctggccctggtgggggctccccatgtggtttgggtcatgaagttagagaagacaccaacgatgagggacagtgagtagatggtggaatcactggattggtattcccagggtgggggtcgaaggattgttggaattgatgtgctaaagggtggacttcaagcctggaatgcaggcacatatgcaatgagtagtcactgatattacctcacagcatatgataaaatgatagagtctgtgtcctcagagcctgtggccaccttgcatgggatgagtggaaagatggccagagagtgggaagtgtgaaattgagagtatggaagggctggggttcttgggcatgatgaggcctaggggatgacaggggcatgagattcaggcagagagaggagaaggtcatggaggagaggagttccaggatctgagagtccagggagcaagggcatcttctctgctgtataggtgtctattgctgccataagaattaccacaaaccaagtggctttaaacagcacctaattatcatgttacagtcctgtaggttgcaagtccacacagtcttatggggctaagatcaaggtatgggcaggtctgtgttccctcctggagactctggggaagaatccatttccaagctcattcaggttcttgtctgaattcacttccttgcacatagaacagaggtttccacttccttgttaagagccatgcttagctcctagaatcttctttcagctactcacacatggtgcctaaggcacatccaatcctcctgcttggaacgtctgacctcccctcttctatgtctcctctgccttcctcctctgcagaatctgactccagccagggcaggttctctgcttttagtggctcatttgatttgaatggggccacacagattgtccaggagaatctccctattttaaggtccttaatcgtcattacatgagtaaagtcccttttgccatgtaatgcaacctgttcacaggttccaaggactaagactggacctctttcgggaccattactcagcccaccacatgttgaagtcaccaacagtcaaggagactgctggagagggtgacagtgaaccaagagctacaagagtcaggattgagaggaaaggccaggggcccacagggaatggctacaatgaggggaatgggggtctaatctgatgacagcctaggggttttagggaggagggaggcagaaagttctgagaaccacagtgaggagcaaggtccccacctcacctctgaacccaggggtacaagtccatgggggaaactcccctatgtgggaggacttcagagggggtcatgtcctcagggagaccaggttgctgctggagctgggaggtgcaggaacatcctgagagagggtgtggaggttttgttgatcattgactgagattccagggggtgcactgggaagatttctgtggtttgggaggttggggagacagaatagtggtgtgcagagccttgtggggatgtgagtgcagagtatgtgggggacccagtgtcactgacacaaacagggaaaggatatgatgagctgagtcctggtggacttagcgcagacaatggtgctgaggctgtgggagatgagggaggaggagcaggggtggcttcacctgggctctgtccgtggaggtgaggacaatgaggtggttgggtctcagtgctgtgtggaactttcttttgacctccttatgagtggatggtctgtctgagatagaacgggtcttagaggatttactcattaccctgagagagggggcgtgttcattccaggtttcaggtctgccctgacacctttcttggtggcttagacctccctactgtaaattattgggtgttagtccattttggagttcataacttaaagcagaaactcagagggttgaaatgtcattttcatgaaggatttttattagagtatcatttagattgcctttgcaacctcccatgtgttttgttttttttctaaagggctgctaatcttgttttaaatttgcaatgtagttaatttatcttcactgttaattagttgtgggttgtttaaccttataccatatagttttacatatctataacaacagtagtttgggcctcttgtattctaatagttaagtccttaagctgtgtacacactgcaattcaagtatgagtcatgcataaccgtagcactaagagacaagagggaaatccctctctcctaaaattttgcaaaagttctgggtttttttttccactgagtgggaactagtcagctaatcatgaacatgaggtctttggcctcatttaaaggtgcttcagaagcactgagccataggaaggcctctttgtctaggtccgggaccctacaccatggcagaagccatcttccctcccagtgtgcagtgatgtcccagatagcgaattggttagccacttttcagtctcgggcagttttgttttccaaaacatgggtttttatctcaggaccttcttgtccccagatgatcaaaaccggggccatccactcccttctgagccacctctgcctggggggcctgtggctgtgtcctccagtcacaacagaacactccttcagaacactcgcaggaagacaacatcttgtcattggctcacacatgcacggtgcatgcacagagctttggttctagttcaggaggtgtgtggggaggaggctcactagtccaacagagcttggtaccagtgtcatatgccaggagccaaggttacaaggatgcaaagttcccagacctaccagagaaggcaaacccctgcagcatgcagggctagacaggggcaagaaacaaggtcattccgggccagcaggaagagggaaagggaaactacagacgtacatcagagacactgcagatttggtttcagaccatggcaacaaacaagtcacacaaatttttgtttttccagtgcatagaaaagttatattcacactctactgtagcctattaagtgtatgatagcattatgtataaaagaactatgtatataccttaatttaaaattactctattgctcaaaaatgctaaggatcatctgaggcttcagctaatcttaatctttttgctggggcagggtcttgcctcaatgttgatgactgctggctgatcaggagggtggttgctaaaggctcttatggcaacttcttaaaataagacaatgaagtttgcggcatggattataaagggggaatcagtacttaagtaaggtcaatataagttttcaagttaggtggacctgaatatgaaccctccaggcctttccaccagctagctatagagccttggacacatcttggccatagctggccctgacagacacttgcccagtgggtgagtgctcagtgaacccctctgagccagttgcctcacccaaccagtgatataattccttccttgcagaagaataagtgaaaaaaggcacagtgccaagagaatcagacacaagacctgcggaaggctgtgccagtgctctaaagcaagttctgcctaaagcggcagaaacatttttcacattaggaacaggagttgtttgggatcctgtctggggccagcttgagagcagagcgggagtgggggcctgggtagggccaggcactggagtgaagacaggcctggagagagcctcctgaaggctgctgagcggctcagacagctccttgcctcacctgccacagtcctcccactcccctggctctctcggtgctgttttcttcacctcctcctgccctcctggtccctggcaccccagggctcataaacatgctgctcccaaaactccaaggcaagtatggaagggcagaacagcttctgggacagtgggaagatgaggccacccgctatgtggctccaagtgctcgggtggaggagatgaagggatcagtacagtagtcgggggaaattctctcaatcccaccctgcattaccctcacctctgcagctttttgcctatttccaactctcagctccttccacccccaccccagcccagccctcagggctccctctctccagccctccctctgcccagagcagcacagtccagagtccttgaacaggaattccccctcatctaacagttaatcatttattagtggggacagacacctggttgtctctttccggtgaccccatatcctcattcaaggcatccagatatagcccctgagccagggatctgtatctgccctccagaggcctatgcccaagacaggttgctccctgggattctcactacaggtggacttaagctaatgggctggaaaaagagaaaacgaggtcgaattcctcacttaccatgagatcttgcaacacaggttccaagggcctcaacccctctaccctggctgatgctccctcctccactccctctgaccagggccctgagccccccacacagctgagctggcccaagctgaggagttgcttgcacagcagctggagctggaccaggccctcctggaagggaaggagtcggtgggggcccaggccctggtgctcaagatccaaaagctaaagaaacagatgaggaggcactgagagagcctgggaggagagagcctgggaggggacacccaagcttcccagcagtgcccacagcaccctccatgcctggaactaatgtgcaccacccccaggagccccaggatcagaaacaccccagcatctcccaggccagagaaagcagaagagaccccacaaagggctggcaattggcaggtagtgggggagccagggctctgcagtcttagtcccatccctctttgacctcacagcagggcaccaaggccttacaggaatttaccctgggccatgccctaaaataacctcaccccaaataaaataaagggagagagcacccacacataatgcagatgcacttgtgtttcatttttagttatgttaaaaattctgacaatcaggaatgggggttcaggagtggtgctgaggcagaggacagaagccagggggtgggggaagaggatgtcaggggtggggtcagtagagtctccttcacccccaacctgcagtctcctcctgaagcgtggtcacatgccagaatgggctagtcccctactgtgtctgttcaactaaggggaaaatgtggcatggtgagaataaggaatgaaaaggaaaaagtgaggcaggagcacacggcacacatgcagatgctggtgtactgtgtgggttcagaggacagacttgggagtgggggaagagatgtaatatgatgaaagaaaacagataccccacataacggtcagaaaaacatcccaacacggcatcaaagaccagggtgcatgaagcagccaagtgtccattatgcatcaggtgcccatgacaggattgaagacaaacatattaaggaactaggaagaactaaagggcttcatgacatcagcactcactgtggaggagatgtctgtctcatcaggcagctcactatcactgacctcaaagcgatgctgcccatactgaggatcctggcattattgtcacctgacacaaatgtgatggtcaagccctgtgccacctggaaggggatagagggtaggataggactagaagacccaaagagggaagactctcagagggaaggatgaggatataaagtgtgaaaagatacagaaagtaaggaggtgggagagtgggtgtccctctgggtgtggggcttaactgctgcaggtaggtctcagaatcctcatgcatgtcataggtaaaggcaatgctcatctgctccatgtccatggctcagccaaataagttggtagtcaacaaattgatcttatcttttggggtcattctccagcaagtgcagaacagtaaaaaaatttagtcacctgaggtgcatatcttggcttcctggccagttttcccaaggcctccactgccaccctgcaccctgggtgccctccacactctccaagtgtccagatgtgtgtgaggagttaagggcaggaagaactattggatcgtggatttaggtgcctttttccacctctgcaggtggcaaggtgtggattcataagctggcattgaagcgagttctgtcctttgtgaatagttgtttggtcacccacagtcatagctgagccctgagaataagagaaacttgtctagaaaaagaaattgtgttgactcttaaatagacatttctggtctgcgttttatttcaagtgtctgggaagagatagagtgtgaggttcaggagagaaggagaggtctgtcttgatgctttgacacagcaccaagaaatttcccctcctcccccacatcgccccgccagttctcagtgagggacagattcacagcagtactgaaagggctgggaagagatggggagacatctggggccaatgttcaggggttgaccctgtgggaggacacctgccttcagagttagagcccacatgtgatgatgtagagctgaagggtgatatcagggaggtgatggagagtgctttggggtttcctgattatgaagagcagaggtcagtctgcttcctgggtgaagtgactgctggggagattggattgaattaatgaagaataaataaacggggaatgaggataagcaagcatcagcatctcccaccatcagttcagactgaggggagtttggattgaattaatgaagaataaataaacagggaatgagtataagcaagcatcagcatctcccgccatcagttcagactgaggggagtttggactgaattaacgaagaataaataaacggggaatgaggataagcaagcatcagcatctcccgccatcagttcagactgactggggaggtgggatagttattgactctgttacgtggttcctcctaacttcctggtcttggggcacacagatgggtggtgctgttcttggtcaaggcagcctcagctccacccaggtaaggcagtggtggcagagagagttaggggagcacctgtgaaaccgaccaaggcagagatgggagccctctgtgcagcaggagtggatgcaggacctgcctggaagcaagaggatgagggaacctagttgggtcctgttccctgcctgcctgtgttcgcagggtaaccagtaagggagctggggtagggaattctttcataggttatctagccagagatatgtttatagacatgttctttcatgtttatattcaggtttgttgtcacatagacatttatccatgcgtgttttatgtttgttactttagaatggctcagtcacaaaatcttaatctcttcattcctgctgcctctctacacacacatacacacacattcacacacatgctatgcaaacatgtctacctgtatctacaaagagagatgttattttatttttaaatttttaaattcgtatatattcatggggcacaggtgcagttttgctacattgctatattgagttgtggcaaagtcagggccttcagtgcatccaccactggagacagatacattgaccccaacaagaaactcctctacgatacacccactgccaaccactcttacccttctgggtctctattgtctatcattccacacgctgctttcatgcatataaagagatattaatcagatatatcagagtgataacttgaattttactgcactattctttcagcttctttgcacatttgaaaatatatacaattataagttggaagaatgagggaacaaaaagagcgagagagagtgctgaatctgaataggctaggggttgggtctcactaggaactataattgatctctgccattttgaaagtgtggccccctgagctgccttcagagagtcctggagggaaacctgttttcacagtaataccaagatgccatttgcctgtttcattatgttgacttttccattaatgctgcaaatgccaaggtcggtagcacacccagcaccttagcagaaccaaggcagtggctccaaactgcagtcccatttaagaatgcctttgatggagcagtaaaatatttatgttcattaaattttgatccttgagtacatgtctttaatattctttgtgagaaaatgggagatatgcaaagagaagcaggatagtagtcttgagaaagggcacttgtgtagactcagttatgagttcaaccagcagatctccttcacccactgaaagacaattgcattatttccagtttatggaagtaattatgaataattacttccaggagtattatgaataaagctgcaagagtatttgtatacaggtttttcatgaacataaagttttcccttgtttgaaataagtgcctaggagggcaatttctagtcatatggtaaattgcatgttcagtttgaagaaaactgcaatatccatttccagagtggctgtaccattttaaaatccattcctaccagcaatatgaatgatccagtttctctgtaaccttgccagcatctgttgctacctttattttgtatttcagccattctcatcactgcagttttgatttgtattttcctactggatagtgatgttgagtgtcttttcatctgtttgttagcctggtgtttatcctcttcagtgaaacgtctgttcatgtcttgctcattgcctattgtttatttggatttcatttttactgttgagtttttacatttcttcatatattgtgaatgcaagtctttattgaatatgtggtttgcaaatatcttctctcattctgtagcttgtctttttatgctcttcataggtctctcacagagcaacagttttaattttgataagatccagtttagtaactttttcttttacagatcatacttttggtgttatgtgtaagaactctttgtctagtcttagttctgatggctttttgttaaaagatttgtaattttaattttttaatgtatttgttatttatttaaaaaaaaatcttgcctaggctggccttgaactcctgggctcaagggatcctcccacctcagtctcctgagtaggtgagagtacaggcctgtgacaccacacctggctcaatgtttgtaattttaactgtgtgttgtgttttacattaaagcctgtgattcattttgagtttttttttttttgtataaagcgtgaggtttgggctcagcctattttttttccactgtggttgtccagttgctccagcaccatttgttgggaaagctctccttccttcattgaattgtgtttgtgcttttgtaaatgtcagttgagcatatttgtgtgttttgctcattttcagttgagttgctcatcttcttacacattgagtttaagaacttgccacattattctggaaacatgttcttcaacacaaatgtaatttgtgataaattgtgaaatattttctccctgtctatggcttgtcttctcattctctcaatgtcttttggagcactcaagttttaaattttaactaagcccaatttctctctctcttttttttttatttgtagatcatgcttttggtattttatctaagaatcttttgcctaactacccaaagtaataaaaattttctcctgtgttttcttttagaaattttatagttttaactcataaattttagctgtttaggtctctaatttgtctgagctgatattttatatggtgttaaatgtaacattgtgttacctatgcaacttcattgaaaatcaattgacaaagaaagtaagaatatctttctagattctcacttctgttcattgatctctatgtctctcagtttcacactgtctggattattgtagtttcatatgacattccattttttttttcaaatttgtgttggcccttctgcatcctctgcattttaatatacatttttaggattattttgccaattttcttttctttttttcttttttttttttttttgagacggagtctcgctctgtcacccaggctggagtgcagtggcatgatctccgctcactgcaacctccgcctaccgggttcatgccatttttctgcctcagcctcccgaggagcccgccaccacgcccggctagttttttgtatttttagtagagatggggtttcaccgtgttagccaggatggtctggatctcctgacctcatgatccgcctgcctcagcctcccaaagtgctgggattaccggcatgagccaccgcgcccggcttattttgtcaattttctataaaatccctgctgggattttgatagggattgtgttgaacctatagatctactgggggagaattgccatcttaacagtattatcgagctttccaactcgcatctctccatttatttagacctttaatttctctgaggaatgtttttttattttcagtgaacaaacactgctgtcttcctaaatttattcctatttcgctcttctggtaactactgtgataggaaagttgagattttcattgcttctatagagaaatatgttaataattaatttttatattgatttgatatcctatgggcccttctggattcatttattagtgctagccagtttttatctgcttgtgaattctacagacagggtcatgttatctgtgaatagaattgtatgttttcctttttatctggatgcctttaatttttaattttctgccttattgcactggctacaatctccagtataatattaaataaaagtggtgggattggacatccttgcattgatccccatcttaggagaaaagcattcagtcttcagtctttcttcattaagtttgattttagctgtgggttttttatagatgcgctttatcagagtgaagaaggtctcctccattcctattttgttgaaacttatgaacatgagtgatgttaacatttttgtcaactgtttcttctgcatcttttgagataattatgtctttttttccattaatacagtgcattccatgaattgattttcaaatgttaatccaaccatatgttcctgggatgaatcccattggtcatggagtgtaatccttttttatgtggctttgtattatctgccaatgtttgttaaggatgttttcatttatgtttattggtgacactggtgtatggcactcttttcctgtgagtcttgctgtgactttgatatgagggtaatgccagttctgtaaatgggctggaaagtcttccctcctctcttcttgtctgaaagagctttcaaaatatttgatagaattcaccagtgaagatatctgggctttggcatttctttttgagaaggtttttcaatttctgacttagttcacagttctcttcaggttttccagttaatttgggtcagttttggcaatttctatctctgcacgaattggtcctttttatctaagtggtctaacttattggcttcaggtttttcagagtattcacttataatgttttttaacttcctaagggtcattagtgataatctcttttgttcacaattttggtaatttatcttatttctcataatctcttttttcactgttggtcaagaaaacagacagaggcagcagatggagatgtgacagattctctagtgggaaggctttgatcataatacctggcaagccagaatgatgccagcaaccccaaaggagctgccaatggatcttgacaggaaaatcactgactctggattgggctatgctcaaccaggggtagatgtcaatgcttcaagggctatacaaggaccagaaaagaagaggttgcaccaatttggactgccgagtcacacttctttacacaagaaaacacactttacagcctcaaacggccaacaatgcagagggacatgtcctcctcaggggaaaatttgatagaaaattgaaatggtcaattgaaacattgtttgtctaaaaactgccaatctaattgttgggcaatataaacatgaaggactggcttttatatcttcatgaatgtgctcgctgtcaacatgagtggggctgcaagaataactccactaggtagcatcctctcttttacctgatggatcaggacgatgctgttacgacgatacatacaattcttctgaaggggagaggatgctggaataaagactacacttcacctcaaatttattttttcatatgttatgccatagtaccaggaatagggatgtaaataaaagtgccagaaacaggaattatccctaagcgaaaaaccataactatatttttacacctttatgtaagaattctcaagtattcatttcatctgaaaagttaggattaacagtaagtagagttatatagcctggtggtctgatagcccccactagttccttacctatataacctaccctctatgatcaagactagactgagggaagacatgctagaatactattgctgcctgcagtctaggccagcccagcagacaaacctaatgtcactcccaaacctggaaacaactgatataaaaggacagagggaggaatagtggctgagggtaagtgaataaatcaaagggttatataatgagaaaaattcaatattagcttaactcctcaaaggtggtgtgagcaagagaagatattgtcacttaggtcaattatacgggatgcctaaaagagtgaagctgtatgtccctgagaccatccttgtttttggaacctggtaagattgagtgttgtcagcaaagctgagtgatttcattctgggagacatattcatacaagaggatgataaactggcctaattttgaatgaatggatgagactctgataatatgccaatacctctttactgttacaatcctttttcctgtaaaagatatgtggtcaaagaaaagtgggcaatctgagttatcacaaaaacatttagtctttgtccctggtttctcctaaaaaccttagactctcttgagtgataagagtgtctttagagtactgatgagaagactcttggctgagtggatcctggatatcttaagaacggtggctagctgccagagacacatacctgtgatgcgagggttatctttttccattttgtgttgctataaagaaatgtctgagactgactaatttatataaacgaggttcatgtggctcaagattctgatgtctggaaatgtttgcgcatttagtgagggcctcaggctgcttccactcatggcagaagacaaaggggagctggtatatgcagagatcacatggtaacagaggaacacagagagtaggaagttgccagggtctttttaacaactagctctcttggaaaataatagagcaacaattcattcattcctgagagagggcagtatctctcgattcataaaagattggtcaccatgacccaaatggtggccattaggccccaagtcccacagtgggcgttagattttaacatgaggtatcaggggataaatgtttatatcattgcatcccctccctagccagccaaaggtcatgttcttctcacattgcaaaatataataatctactcccaattgtcccaaatgtgttaggttgttccagcatcaactcaaaattctagagtctcatctgagacgcaaggtaaattcttatagctttgagcctgtaaaatttttttaaaaaatgttatttgcatctaaaatattaataaaacagtggaagagacatttcttgtacatttccattccaaaaggtatataaatgggccaaaagaaatgaatgcagtttcctcataagattgaaactcatcatggcagacattaaaacttaaaggtctaaaagaatctcctttgactctatattttgaatccagagcacagtggctggtgcaactgctgggctcctaatgccatttgcagctccacatttatggctttgctgaacataacccatatagctgctgtcatgggagaaaattgaatgcctatggcttttccaggctgaggttgcacatagccagtggctctaccatttagtagtcctggcaggggtcctgttgctgcagctccgctaagaattttcctgggtattaaatttccccatttaaatatcagttccagttttgggtcatttctttgctcacacatatgcacataggctattacaggcagccagaccaaatcctgaattctatgctactgagaaatttcttccatcagatacccttaatcatcactctcaagtttaaagttccacagatccctagggaggtggcacaatgcctccaagaactatcacaagaacagcatgaaagagatgattctaaaccattcatgaatcatccatcctcatgagccaatcacgtcccaccaagcaccacctccaacattagggattacaagtgagcatgagatttgggtggggacacagatccaaacaatatcaggggtcatggtggacatgagggtgggctggtctctccacttctcacatgttaccagggacatagacacattcagatgccttggcagaaagagaaaacagaggcccttgaagtctcaaagtggagccatgaacaaatcttgcatctcagtccctcacaaggcagtcttggaaagaaaatattcgtgaacaaattcaagtcagtcatggtaagtggtgacactgaacagcccaccacacattgaaaaattccaaatcaaagactctctagagcctagttgtgtcccatctgccccaactcctccttcacttcaggccctctaaggtgtcacttttacaagacttgagagacacatcagagccctgggtactgttcctgtttggggtggaacaaaaacaaagtctggtcagagcccacaggtgatgtgactaaaggaggaattgtggggtggtgacctcccccatgggctcctgtctacactattccaaggatctcaggaatcactctcccacccctaccacacttacttgaagcctgagcatagctgactccttttccatatgaggaaagaaaacaaactgtgagaggccagggaagaggcagggccatgagatcctagaggagtttccagaactgtgactgcagacccaggtcaggatcagaaaacccgagggaagaggatgtgttgaagctgaaccaaatgtccttttgacatctgtcctcagcaggaacattctcctgacttgtgactgctgggagtcaggttcccatgatcacaatcaaggtgataaatttgtccttcaatttcacaggtgctttacaaaagagtgagagttgacagggcatctgaacagggtaaatgtgtgtggagatggtgtctcacaactaggcaggaaatgagccaacttccatctggagcttgaaatccacgaatggaagaagaaatcttggaactcacccctttcctacctggggtcttattcttccacatcacagcagtgaccacagcacctagaacaaccaggacggtaacgatgcccatgatgaggaatgtgggctgggaagatggccctaagaaaggaggggaacgtgaggggtcctgacccccaggcctcagccctgaccctgctgaaggcctccagaagggctcctgctttccctgagaagagacatggcccctcattcatctccttagcccatctcagtgtgaggggctctggcagtgcctcctgctgcacatggcatgtgtatctctacttgtctctagaagacagcatcacagctgcccacttctggaaggttctataccctgcaggtctggtccccacaagctctgcgtcctaaatttggtcctccccatcccacagttgggtcactgtgatttccacatggtagaagcccgggacccagcacctcagggcggcctcatggtccgagatggggtagtggatcacacatgtattctgggattctgaagggaagagtaagaaaattgaggcactttgcattcctcatgggacactccagcagcacccatgtgaccatcctgagaatggataggacatctggggtggggaagggagcacagaacccagacacctcctggccacaggcacctgggataatctcctattccttggaaagttagtgtctgaggcgttgaataatttagagtctgcagagtgcctgggattgcaggcgcgcaccaccatgcctgactggttttcgtatttttttggtggagacggggtttcactgtgttggccaggctggtctccagctcctaactgggagtgatctgccagccttggcctcctgaggtgccgggattgcagacggagtctctctcactcagtgctcaatgttgcccaggctggagtgcagtggcgtgatctcggctcgctacaacctctgcctcccagctgcctgccttggcctcccaaagtgccaagatcgcagcctctgcccggccgccatccggtctaggaagtgaggagcgtctctgcccggccgcccatcatctgagatgtggggagcgcctctgccccgccgccctgtctgggatgtgaggagcccctccgcccagcagccaccccgtctgggaggtaaggagcgtctctccccggccgccctgtctgagaggtgaggagcccctccgcccagcagccaccccgtctgggaagtgaggagcgtctctgcccggcagccgccccgtccaggagggaggtggggggcagcccccgcccggccagccacctcgtccaggaggtggggggcgcctctgcccggccaccccgtctgggaagtgaggagcccctctgcccggccgccaccccgtctgggaggtgtacccaacagctcattgagaaggggccatgatgacgatggcggttttgtcgaatagaaaggggggaaatgtggggaaaagacagagaaatcagattgttgctgtgtctgtgtagaaagaagcagacataggagactccattttgttctgtactaagaaaaattcttctgccttgggatgctgttaatctataaccttacccgcaaccccctgctctctgaaacatgtgctgtgtccactcagggttaaatggattaagggcggtgcaagatgtgctttgttaaacagatgcttgaaggcaaaaaaaaaaaaaaaaaaaaaaaaagaatgcccaaaatgacaattttctgactcaagcatctacaaaaatatttgcctaatcagggtgctttgcaattagaaaaatgtgagtctcacatctttgtctgtacaactggcttagcatcatgacaatgatttggtttgatgtggtaggtggaaatggttaaattcaatctaggaacaagatttttcagtaactggctattcagtgggcatcctgtgatcagtttaacatctttcactgtggtttttaattagatgtggtagaagtgatttggactccagtatgattctgaaaaacactgttattttgtgcttctaatgttgctttaaaagcagctctttcgtgttttccattcttattgctatttcatcactagttattcatttatgtcttttcatttaatttattttgctcaacaatgctttttttctattctgtaaaagtttaattcacttgtatgtgtggtaaaatgtgagcaacatatcaaattctcaaattctttgcaagatactattgccttacctatcagattgaacactgtgtatcagaaaatgtagagagttgccaactagccaaggatcaaatgacctatttgtagccaaggctgtttttcatggcatcctggtcctctcacatggctccttaaaattggctgtggcttgttttttgtggttgtttgtttgtttgttttgagatggagtatggctctgtcacccaggctggagtgcgatggcaggatctcagctcactgcaacttctgccttccaggttcaagcgattctcctgcatcagccttctgagtagcttggattacagacacgcaccaacacgcccagctaatttttgtatttttagtaaagacgaggtttcaccatgttggtcaggctggtctcgaactcctgatctcgtgatccacaggtctcgacttcccaaagtgctaggatcacagaagtgagccaccgtgcccggccagctgcggctttgttttactacgagtagttatcgcaaaggatgcttgtgatgaactttggcattttcttttctctttcatttccaaataatcaatcaggaatggcacacaaggtgcattttgaaaaataccactttaaagatttgtgggccaggagtggtggctcatgcctgtaatctcagcaatttggtaggctgaagtgggtggatcacctgaggtcaggagttccagaccaacctggtcaacatggtgaagcccgtctctactaaaaatacaaaaattagctgggagtggtggcatttgcctgcaatcccagctgctcaggaggctgaggcaggagaatcccttgaacctgggaggcggaggttgcagtgaactgagatcatgccactgtactccagcctgggcaacaagagcgagactcaaaatatataaataaataaataaataaataaataaagttttatgatcaagtaactaactacctggatatcccctcctggcataagaaacagaacctatgaagccaccctaggctgttgtccaatcctatcccctaaaaggaacctatgtcttgagtcttgtatttgctattccttggcattgtcactgaagatttttacaataatacccaaatcacagtttgacctgtatttttttaacttccccatacagagaactcacaccgcatgtatattatgtgttggggagttatctctgatgtgggagggtgcttatccttttaatttttttttctttttgagatggagtttcactcttgttgctcaggctggagtgtaggggcgggatctcagctcacttgatctcagctgcttggttcagctccatctagcatctttccccacgctgtcacccccagcaccaggggactgagagttgatgacctggtacaccaccgcctggatctgctgcagtgtcctttcctgtctagtccgcactcaaagctgacctcttcctatattatacccagacagtgggccaaacaatatacttagatgtggaatgtggtgttgccaggacccagagaagctcaccaaatagtgtgcttccttccttctgttgaggatgcaagatgcaagtttgtcttttactttggaggggacagccctgcatgcccctaaccactggacccataacacttcactgcagtggccactcttgaagctctgtaaggttaatcttcaccttctgtagtgcacacgttttgccaaagaattcagcgtactttcctcctcttactcatccatcccaatctatgtgatattgccaatgaaatgaagagatttagtattctgtgagatgtctgatttgtccagatctcttaaggtgatatttatagaaggttgaggagttaaagtagccctgaggcaagctatcaataaatgtattataaatcccatgtgaatgtgaatcattccatatccattttctaaatggaatgggaaagaatgcactcaccaaatgcatggctgtttgccatgtgcctgaggccttattaatctccccaagcagtgatatccagccagcatggcagctgcaatcaggactcctacttggtcaagtctggagtaattccattcattctttatcaggcttcttcagggacagactgctgaattatatggagataataggcaatcccaacaccaccccccatccttcagctctctaatggcagtgccacccctacaatacctgcagtaccctcctgaagtcccacctggggcgcaatattgcttctggcttggctgggatgagggaagttttagatgattccctttgggcttcagcacaatgatagcccttactctccagactagggatgtagtgtgggggtgactccctttgccagtgcatcaaggccaattatgcatgtggagaatggggagataaccaggactgggtttatgaacccagtggtcccacagtgggccataatgtgtccaggtttatttcctggcctccttaagccccactgtagattctgaatctgaagcttggctgaagtctaggaattgagactgggatcatgactttgtatttgatcaaacaccctcagtctcctgctcctcaattcttgcattcccatcatagatatgaagcagtgccctcgctggctgcccatctgttctgacgctgggacaccaccttttactaacctttcccaaaactccatgaaggttgagcccctttggctgctactctgggttctcacagtaaccgtgccctctatcttttgcaggtcgctgcaaaggagggttcctaaagcattcactcctgatcctgagggaggtgggtgcactcactccaggtctcaggtccgccacagaaaagcaaaaactcctcacattcaaaactgtcctgggccacattcagcctgcgagctacgggttagacaagctagcatctagaacatatgtaccacaacaccagaaatttttctgttttcaccttaatgatgctttctaaacgcaaaagcagtcatatccctagcagacaacaaatgtcagttgaatgaatgatcactgtagagcacttctctattctaaagccaatatctttgttaaggtagcctcagggcaaatgctgttttgtggcagctaaagaacaacatcatctcatgtggacatcgatgccgccagtgcttttctcaccaggactgcttgtgtgtcctccctccctccctacctcctcccacaccaaccctcctgcacactgcagcacacaaccatatttttctcttcaggaaagataaccctaggcttatgggtacaattttccaaccacgtatgaatctaaattagactctgctttgtaaatccatgagtttggattggagccagcactaggattactacaactcagggcaggaagaagagtaggagagcagaagaggagctccaacagaaagttcactatgatgagaaactatgggacccctcctctctgcaaatttcagaatctgcttcctttaaaaagattggagacaagatgaaaactacaatccaggaaagagccctgggaggagggcaagagctggacaggtctgaaaattagtctcttgataccacaatgagatttgtatgcagggaccaccctaggtgacatccaactccctgtgatcacaggtggtggtgggacaaggttctactgaagggccaaggagaatgaaggagcaaagatgacccagctgagcagtgaccacataaagtccatactggcctgagcacccactaggcacagccccatctattctcctcccctgcaacaaatcagcacaagaaacacatggactctggaaggttctcatgtgttccatttattttgtctctcaaattttaggaatcttctcctttaattaagtcatcaacctctcatggcaagaatttgaaaaagtaaatgtttactcagattctaattttaagagggaagtaagaagttacagctcagtgcacataaagttgagaaaaagatggagacatctcagccccgcctctctggaacaggaaagatgattggggagggaacacagatcagcgtggggaagagggtcatggtggacatgagggtgggttggtctcccctcctccacacattatgcctacaggaacacagacacattcaggtgcctttgcagaaagtcagggttcttcaagtcacaaagggaaggtgtgaacaaatcttgcctctcagtcccacacaaggcagctgtctcacactatagaaaaaatattcatgaacaaattcatatctgtcccagtaatggatgacactttggcagcccatcgcatgctcaaaacatcaaattcaaagaaccccatagcacagctgtgtccactgttcccccccaacaccccccacacatcaggccccccaaggtctcacctttcacgccgtgagagacacatcagagccctgggcactgttgccgcctggagtagaataaaaacaggacctggtcagatcccacagtagatgtggctagaggaagaattgtggggtgggtgagctcccccatgggctcccaaacacaatatccaaaggatttcagggatcagcctccttcatacttacttgcagcctgagagtagctccctccttttctatctgtgggaagaaaatgtcctgtgagatgccagaaagaagccagggccataaggtcctagaggaacctccaagtcttggaccccagagaagtttccagaaatgtgcaactgcagacccagggcgggatcaggaaacatgaggaaagcagatgtgggtcctggaccaaccgcccttctgaggtctgtcctcggggaccttcccctgtgacttgtgactgctgggatcaggtcccatcaccacagtcatcaaggtgataaatctgtccctcattgtaacaggtgctttacaaaagagtaagtgctggcacacagggcccaggctgggtaggcccatgagtgtggatggtgcttcccagtaaccaggcagggcacttctacctggggcttggaactctcagtgagacaagaaatctcagaccacactcctcaccccttccttacctgagctcttcttcctccacattacagcagcgaccacagctccagtgaccacagctacaagtagaaccaggccagcaacgatgcccacgatggggatggtgggctgggaagatggctctgggaaaaggggggaaggtgagggaccctgaccctgctaaagctctccagagaggctccggctttccctaagggacatgacacccccatctccctccttaccccatctcagggtgaggggctctggcagaccctcatgctgcacatggcaggtgtatctctgctcctctccagaaggcaccaccacagccgcccacttctggaaggttccatcccctgcaggcctggtctccatgagctccgtgtgtgggtctggtcctccccatcccgctgccaggtcagtgtgatctccgcagggtagaagcccagggcccagcacctcagggtggcctcatggtcagagatggggtggtgggtcatatgtgtcttgggggggtctgacaggaagagtcagaaaattcaggcattttgcatctgtcatgggacactccaccagcacgcatgtggccatcttgagaatggacaggacgcctggggtggggaagggagcacagaacccagacaacagcctggacacaggcacctgggataatctcctattccgtggaaaattctagtccctgaggagggaacagcgacttctggtcctgacctgagtggaggctgagggactcagaagagctggactcagacccccaggcacattgagtgtgaagcagagaacaaggcctgagaggaaaagtcacggggcccaaggctgctgccagtgtcaaagggaaccactcatcagtattccagggattgtcttcccttcatttcctcagagatttcatcccttaattgtgtcaaagagcacggcggaccctcagagtcactctctggaaacccaggaggattcttctccctcaggaccagagggagggcgatattatagtgttggtcccatttgtctccctttcttgtgggaggccagccccggagatctacaggccatccgggaggcgccctgtggcccctggtacccgcgcgctgcagcgtctccttcccgttctccaggtatctgcggagccactccacgaactcgccctccaggtaggctctcagctgctccgcctgacgggccgcctcccacttgcgcttggtgatctgagctgccatgtccgccgcggtccaggagcgcaggtcctcgttcagagcgatgtaatccttgctgtcgtaggcgtgctgttcatacccgcggaggaagcgcccgtcgggccccacgtcgcagccatacatcacctgcatggtgtgagaacctggccccgcccccgcggtcagcccggtcccccgagccccgccctgccccgaccaacccgcggggattttggcctaaactgaaaatgaaaccgggtaaaggcgcctgggcctctcccaggtcaagggtctcggggtcccgcggtttcggggaggatctcggacccagagactcgaggcgacccggccctccgtgggggatggggaggggtcgtgacctgcgtcccgggccggggtcactcaccgccctcgctctggttgtagtagcggagcgcgatccgcaggttctctcgttcagtctgtgcctgggccttgcagatctgtgtgttccggtcccaatactccggcccctcccgctccatccacggcgcccgcggctccatcctctggctcgcggcgtcgctgtcgaaccgcacgaactgcgtatcgtccacgtagccgacggagatgaagcggggctccccgcggccgggccgggacatggtggtgtagaaatacctcatggagtgggagcctgggagcgaggaggagctgagacccgcccgaccctcctccctgcgcggctccctgggtcctgcgcccccgccgggcgggcccctcgctcctcccgaccatttccctgcagaccctgcactcacgcgcccaggtctgggtcagggccagggcccctgagagcagcaggaggagggttcggggcgccatgagcaccatcctcggcgtctggggagaatctgagtcccggtgggtgcgtggggactttagaaccgggaccgcggcggcaccgattggcttctctagaaacccgacacctagtgggaatgagaactgtgcccgcttcctgagtatccaggaaaaaggacccgtcgcaggttgtgagaagaagagaaactgcggaggtggcgaatccccaaggcggggcctccccaatccatacaccgccttcggggcctgagaccctgagagccacgcctggggccctgggacttcgccctgaccccgctcctcctgtgccaagcgctctgtctcagtgtttccctgagtcttggcccaggagctgtctgagaaaccaggaagaaaccctcggcatgggccctgtccctctcccttcacttttcatccaggaatctccgtccctgaactggactccctgtccacctggactcttctagaagaaaagtcacccacggagtttggtgacagagagtgagcttgctctgggaatggaggtgtagaaactgttttttgttttccttttttttttttttttattgggaaaagttgtgcctgagtgcatgagacagaatagagaccagtttatttatttatttgtttattaaatacattggatagcagaaccttggtaacccctgaatgatcaggaatctaatcggtaaaaaatgtgactttggccccatgatgtataaatgtgcccaaaagcgttagaacaggactcacaaagcttctaagtttcacttttgcagtgtacctgtgactcccgcttgtcatattttaaatttgccatcattccatagctctgagtttctgtgtgagtccaggatatctcctcaatacaaagtagcacactgtgtactttgcaaccaggtacgttgcaaccaggagtcagtacaggctttattcacctcaaagttgcaactgttcaatgtagtcgcaatgcccctcactagtgctcatgcactgcctgtttttaggaagtatccactgctaagtgttgtgtatattttataggaacacttagtaatttttaaacctgattaacattaaaaaattagtttttaggcagacccacatgaggtattaaaggccaactgccaaggacaccctgctaggctctgtagatggatgtattaaaatccataaaacaatgtatttaaacctaagaattctgctgctttcgaattctttcctctgctccttttcttcacctcctgcttctccagcccttctctccgtccttttcatccttcaggccctcctgtccccttagtccccaccacactgtcacttgtgagttgtgacactagcactgtcccatgacctgttacgtgactgttcttttcacagtggtcctgctcctgggagtcggagtgtgtcatctctccacttaaaacactccagtgtctccacctcggtcttgagaaacttctggagtgtcaggcacgtgagcatatgaggggatatctggtttatcgtagggactaaattaatttttgtcgactgaatgaatgaaatatgagtgtattaaattgcattacagataattataaagtgcaaaacacggaaaaagttcagaaaatttttattttatgtaactagtgtgcatatcaattcatcaattcattcgtgcactaccatgcctggcgaaacaacacccatttatctgcttatagttccttgatcagaaatctgggcaaaattgtggatggaatctctcttctgggcttccaaaagctgtgttttcattttgaatcctccttcaggcttatacagaggtggcagaatgcagtttctggcagttgtaagactgaggtccctgttccttgctggctgtcaatgtagagaacagggagggctgtgctcgattcctggtcctcaccagcattctttcctacacagccccttcattttttattttatttatttattttttggagatggagtcttgctctgtagcccaggcttgggtgcagtggccggatctcggctcactgccagctatggctcccaggttcacgccattctcctgtctcagcctcccaagcagctgggactacaggcacccaccactacgcttggctaatttttttttttttttttgtattcttagtagagacagggtttcaccatgttagccaggatggtctcgatctcctgacctcatgatccgcccgcctcagcctcccaaagtgctgggattacaggcgtgaggcaccgcacccggcccacagccctttcattttcaaagcccatgctggaggaaacccctcatgctgagtccctctcacactgtgagtctctatgctcaggaagaacccagtcctttcaaggtctcacctgattaggacagtccaagcaggataaacccagcctaaagtcaactaattgagacccttaattatatccactaactcccttcacagcagcacctacattagagttgattgaataactggaggatggtgaatgaccaggagctggttgttgagggcataatagaatcagcctagcaagggttggatcttccttttgtgtttacttcggacacagttggaaattgaagttcaagtaaagtgatcattgtgaatggtcataaaatacatcctcttcagccatggaaattctccttaccttttaaaactaagttacatgtttaatatcttataattaatttacgccaggtatggtggctcacgcctgccatcctagcactgtggaaggcagaggaaggcagatttgttgactccagaagttcaagatcagcctgggcaaaacccccatctatacaaaaaattagaaaattagccaggcatagtagttcatgatggtagtcccagctactcaggaggctgagatcagtgggtcccttgaacccaggaggtcgacactgcagtgcatggtgatcatgccactgcactccagcctgggtgacagagcgagaccatgtctcaaaaataataatgatgacgatgatacatttaaagcaaatgcaatttaatgtgtaataatacatcctctcttgtgaaaatgtgttatttatttactattgcataacaaattatgtaaaacttagcttaaaacaacaaatattcctcatctgccacagtttccaatggtcaggagtccaggagaggtttccctgagtgcttcttgctcggggcctctcacaaggttgcagtccaattgtcagccaagggctgcatcatctgagggcttcactggggctgaggattcacatgaaacatggatcagtcacatggctgttggaaaaggcctagttctttgttgtctggtcccggaaggcctcagttctcagccacatggaccttcctgcagggctgcttgtggcacagcagctggcttcccccagagctcatgatcccagagacagagagagagaaggtggaagccgcagtgagttttaggttctacacccagagttacaaaccattatgtcagcattattctataagttagaagttatattagtccattctcacactgctatgaagaaatacctgagactgggtaatttataaaggaaagaggtttaattgactcacagttctgcatggctgaggagcctgccccaggaaacttacagtcatggcagaagtggaagcaaacacatccttcttcacatgatgacaggagagagaagtgcagaatgaagcagggaaaagccccttataaaaccatcagatctcatgagaattccctcagtatcacgagaacagcatgggggcaccgcccccattatccaatcacctcccatgtggtccctcccccaataggtagcgattacaattcgcataacaattcaagatgagatttgggtgggaacacagaaccaggccatatcagaagtgcctcattaagtccaagccacactcaggagagggaattaagatgcacctctggaagggaacagtatcaaatgttttgaatatatgttaaaagcaaaattataactattgtttcaggtttttgaaaatcaaagacttcttttatctaattatttttcattaactctttcagcttgtctttttctttaagcttgtcttttaatttaattttttttaagttccagggtacacgtgcaggatgtgcaggtttgttacataggtaaacatgtgccatgttggtttgctgcacctgtcaactcatcacctaggtattaaccctggcatgcattagctatttttgctaatgatcctcccaccaccaccctgccccaataggccccagtgtgtgttgttcctctccctgtgtccatgtgttctcattactcagttcccaattataaatgagaacatgtggtgtttggttttccgttcctgtgtgagtttgctgaggataatggcttccagcttcatccatatccctgcaaaggacttgatctcattcctttttatggctgcataatattccatggtgtatatgtaccacattttctttatccagttcatcattgatgggcatttgggttgattccatgtgtttgctattgtgaatagtgctgccatgaatgtaaacatgcatgtatctttataatagaatgatttgtattcctttgggtatataccctgtaatgcgattgctggatcaaatggtatttctgattctaaatctctgaggaatcaccacactgtcactgtcttccacaatggattaaccgattgacttttccaccaacagtgtaaaagcattcctatttctctgcaacctcgccagcatctgttgtttcttgactttttaataattgccattctgactgacatgagatggtatctcatttgtggttttgatttgcatttctccaatgatcagcgatgttgagctttttttcatatttttgttggccacatgtatgtcttctttagaagtgtctgttcaagttctttgtctactttttaatgaagtttttttttcatgtaaatttgcttaagttctttgtggattctgaatactagacttttgtcagatggatagactgcaaaatttttctcccattctgtaggatgtctgttcactgtgattgatgatagtttcttttgctgtgcagaaaaaaatgcctaatcaaattgcttttcatttacaaaaatgtgaatctcatacttcagtaaactttattttactttagtaaaaattattagcatgatgccaataattttggcttgatgctatagcccgaaatggttagttctaattgagaaacaagtttttttcaaaaactggctatttgatgggcattctataataaacttaacatcttttgttgtggtattgaatgagatgtgatagaagtgatttggacaccactatgattctaaatagcgctgctattacatgcttctgaatttttttttctttttagcagtcctattctgttttccattcatatttgctattccatcactgggtattcctccctactcttttcatgtttcatttattttgatcaatgatgtgcatttccaatctgtaaaagtttatttcagtttaatgtgtggtaaaatgtaacatcaaatctttggaagatgaaattatcttgcacagcagattgaacattgtatcattgaaaatctagagagatgccagggagccaaggatcaaatgacctatttgtagccaatgccattttcatggcatcctggtcctctctgtcacatggctccttacaattctctgtggttttcttccaatgtaagtagttcttgttaagaatctttgcaatgaactttgaaattcttttctttttcatttctataaaaaacaggtatattttaatttggaaaactctgtttaaggaattataatcaagtatctacgagggtgcccagcgctggtgtaaaacacaaacctgtaaagctaccctgggctgctacccagtcaccccctagaaggagaccgttgggagcaagtcccccaaaatctggccataaactggccccaagactggccataaacaaaatctctgcagcaccgtaacatgttcataatggccctaatgtccaagctggaaggttgcaggtttacaagaatgagggaaaggaacacctggcctgcccagggcggaaaaccgcttaaaggcattcttaagccacaaacaatagcatgagcgatctgtgtcttaagggtgtgttcctgctgcagttaactagcccaacctattcctttaattcagcccatccctttgcttcctataagggatacttttagttaatttaatacctatagaaacaacactaatgaccggtttgctgttaataaatatgtgggtaaatatctgtttggggctctcagctctgaagactgtgagacccccgatttcccacttcacacctctatatttctgtgtgtgtgtctttaagtcctctagcaccactgggttagggtcttcctgaccgagctggtctcggcaggagactccatcctgagtcttctgatacgtattcctttgtattccttcaaagatttgtgcaataagtgtatattatatatatatatctatatctatatctatatctatatctatatctatatctatatatatatatatatatatatatatatatatatatatatctccccaaaacaaacctcagttagttttgctggtttttaagcttcctgtacagcaaattcctactgcatgtattttcccatgatacacattatgtgtaggagttatctgtggtgtgggaggctgtcattcattcatttttacgctgaaggcttacatatcgttttaccacaatttcaccggtttcctattgatgtacatgtggccgattccagtttttgccataaatattagtgtgcatgtctcctgtgcacataggcaagaaagccccaaagcccccagagtggatgattaggaatgggttggttgcatgatacattgtatggactttaaccatactagataatgataatatgatttccaaagtaattgtggctacttaaacttttacaataaatgtgtaatacttgatgttgatgatgtgttctgaaaacactgagttgaaggaattgtgttaaaagtcaccgtcttggtggtagaattatagcaagcatttttattctgttaataacttcctgttgtttacttgtttctcatataaaagacattatgcttttgacatatagattcagaaaatgcttacttacagcccaatcacatagggttattttatattttaggaaaattttataataaaaaggaaaaaatggaggaagggagggaaagaaggaggaatggaggaaaaagtgaaagaagaaaagaaggaaggggaaggggaaggaaagggagcaagaaggagggaaggtgataggttgaatggaaatagagaagaaagagagggagggagggttagaaggaaggagaaagggaaggaagaggccaggtgtggtggctcatgcctgcaatcccagcactttgggaggctgaggcaggcagatcatgaggtcaggagatagagactttcctggctaacatggtgaaaccccgtctctactgaaaatacaaaaaaattagctgggcgtggtggcaggtgcctgtagtcccagctacttgggaagctgaatcaggagaatggcatgaacccaggaggcagagcttgcagtgagctgagattgagccactgcactttagcctgggcaagagagtgagactccatctcaaaaaaaaaaaaaaaaaaagggaaggaataaaggagaaaagaaactaaaataaagaaaagaataggtgttgagaaactagaaaccctatgtgtggctaatattatcaaaataggagaaaataaaagagatgtagttaacttctatagaataatggaaatgtaagagggcttcattagttatccattgctgtgtaacaaactacccccaaatttagtgattaaacaataaacattgaggaactcaaaagcatactacaaataccagcaaaatggagccaatgcaggtagaagttgaataaacaaaaagattttacacattggaataagtaagagatcactagtgggcagatgaaaatgattttatagtccaaatgctccaaaaagcaagttccatcatgggattaaagttatagcattttattaggggacacacctgtcaggtgatatggcaagggaggtaggttaccctgggaaaggcaacaagatgcaaaggtgatccccagtgatggacagaaggagacaaggtttactggatgtgccgtagaccacaggcaatctaaggagagttaagcaaggccatggaggagtccttgagctacagttggccatcagaggagtccctggtctcccaggaatgtcctgctttcgtgtcactggtgtgatctgtcactggttgggaacagcccattggaagcaggacctcagcaccaatgctactgaggatgtcagagcacaggagcagggccttgggagattacccagcattactcaaaccttctgccctgacgggtctgggtccttggaaatcaagctgtctcaggctgaattgctggatgattctgctcacacttacaatgaggtaagggaaaccagaaggcccccaggtggatctctggtttccacacacacttccgccctcattgtgtgaaagtagccatgccttctcctgaagatgaggatctgttacctgggcctggagaggaggagaatcctcttttcaccaggtggtctctgggcacaaactatcaaaacttctctcgtgacaaccataatgtgtagttcagtgggctgtcttttgtctccttttaagggtaccctccttggaaaccaggacctcgtaccctgcacagcccagtgttggaagataaaacgtgcaaaataccccattgggtgaatctaagggattggacgtggagccaaacctgcttccatcttttgatccctggacacacatgttcttcctattgagaacacagcactctagagacatctctgattcaaacaatgcaccgtgtcctaaaagatggcacccacctctcagagtgcttcctccaggctggcactgagttttgcctgtagaagacctgtccagcattccttgtggctggcagcctctggatggtgcagatggtgataggattagtggaacccacagccatggaaacactgaaactttcccagccaagtgggtccttcaggcagataatgggctaggagcaccgcctagcctgcagatcaggaatgtcaacagcacccggagaggtgctggctgagtttctgagagcaggacatgaaaacacccatggaataggagcctatccctgtgaagatgaacctctggcccttccaggatggaagtagctaaatgtagtcaacttgttacttagtggctagttagtcacctaaagaaatagtgccccactggggcacatcatgggcctcaattgctaatgagttggacattcagaggtgtcggcagctggatctgccttggtaggggggagtcagtgctgttggccccatacgtagcctcatgcctgccactgtggttgctccattcatgaactcatcctaccaaaccagggctgacccatggtgaaggctggctaacttccatttgtctgtttggttgttcagtgccacttcagacttgggtattttctctgggtgtaaacatgggattcaagctcaacccaggtggaccattttcacctcacgatggatgctgttgggcctgtctaatctatgactctgtgggtcacacaggcactcgaaccacatagttgcttggtgtcccgtggtcaagcattctatctaatcaggacaagggacactaaaagttgcttctaataggtggcatatgtctctgctgtgaatgacatgaccttactccagaatcccaggcctttcactgtgactttcccactggtgcttggttcagctccatcctgcatctttccctaccaatggcatcaccagcaccaggggtctgagagatggtggctgctcgcaccatggcctggatctgctgcagggtccttttctgtgtgggccctacttgaagctggcctcctcctatgtcacctagagtgtgggccaaagcaacatacctagatgtggaaagtggtgttgtcagaactggaagaggctcatcaggcagtgtgcttccttctttctggtgaggatgcaagatgaaacagtttgtctgttaccttggaggggacacacctgcattcccctaaacacttggccattgttcacccataaaactttacttcaatgcccactatctttttctttttgagatggaattttgctcttgttgcccactctggagtgcaatggcacgatcttggctcactgcaatctctgcctcctgggttcaagtgattctcctgcctcagcctcccaagtagctgggattaccagcatgggccaccatgcctggataattttgtatttttagtagagacggggtttctccgtgttggtcaggctagtctccaactcccaacctcaggtgatccatccacctcagccttccaaagtgctgggattacaggcgtgagccactgcacctggccgagtggccactctggaagctttgtaaggtttatcttcaccttctggagtgcccgtgttttgccaagcactacagtgcactttctacctgctgctcatccagccaggtcaacaggaagttgtcaatgatatgagctgatttaatatcctattggatatccagtatgtttagtatagtcttaagactatactatagaggtcaggggagttacaatagccctgagacaaatgataaatcaatgttttgaggatcccacatgaatgtgaatcactccatatccactttctaattggagtggaaagaaatgcagtcaccaaatccacagctgcatgctctgtgtccaagggtttattaatctgctctaccagtgatatccagacagcacaaaagctgcaattataactcctacttggccagacctggagtaatctagttcattctttaggcttcatcaggcttcttcagggacaggttgctggattacgtagagacaatagacagccccaacaccatcccacatccttcagctctgtaatggtgatgtgatccccacaatacttgaagtatcttacacaagacccaccctgggacacactatgatttttgatttggccaggatgggggcagtgtcagaggtttccctttggctttcagcacaatgaaagtccttactccacagactagggacccagggtgggggtaactccacttagcagtgcatcagtgtcaattgtgcactcagggtataggaagataaccagggctgggtctatggatccagtagttccattgtgggccataatgtgtccaggtttactccctgagctccataagccccactgtgatgagagacatgatagtgctgtgggcatctgagcatcaatgtcagttcacacccagtgtcaataatccccccagttctgcctgtttcctttccccagtgtacaatctcctgagtaaatggctatatggtcctttgccgaaggactgagggaattgtcccagcatatacttccacggggttgcagagtattccgcctagagatatggactcttcctctgtcactgagatctgaatctgcatcttggctgaggtctaggcattgaggatgggatcatgattttgtattgagtcaaacaccttcaccctcctgcttctcaattcttgctttcttatcatagatatcaaccagctgcctgtcctaaccctgggacaccaccctctattatacttccccacattccctgcagcttgagtcctcttggcttctcctccgaggttgccatagtaaccgtgccctctggcttttgcaagtcactgccaccacttggtctttgtctcttcagggccacactctccccagtgatattagaaatgaaactctgggactatctttactaccatcacccccagcctacaaaggacaataccctgacacttcttagtgatgcaggtccctctcaccatcaagttcctgaggctctggtggaaggtgtgtcctctgggccctcttgtagagcatggttttggtaggccttcaccaagcccactcccctcagcttgttattccatcctctacatgttccagggcaactaagacatgtctaccttgttgagagttgggcatgtttttttctagactatgtggatacaccccagcagtgggtttactccacttatcaaagtcctggagtgtttgataaatccatgccctgagaaagtgtcttcaagccaaaggattatattcatccagcctgaaattctggttccttgatcaaacaccctcaaattccaatcccagaagtagtccctgggctcctatggggacgtgctggctagttcctgcaaacctcctgagtgggattcccgcggcatcataggggtgaggattgtgtagcatcttccagcagtgaaagtgggaaccattactagagaagggtgagcctcctctgcatgcccagaagatcctggagggcacgcatcgcataatcctgttccagtttgcagaatctcaggtttccccaccaaagccctgactttcctgtaacaggcctgccttggctgagtgtcaaacatctctggagcactgtggccctcatagtgatgtagagctaacattccttgctatctgcccttttgctacaggagataaagacctgtccatgagacactgccgagggtgtcaaatgtagccagtcatagctgtcaacaatccgcagattctcattatctttttacacagcatcgatgcagctgagaagtaactagccaaagccactgtctttgtaggtttcttccaaccctgtccttattatgcagggcattctatcactgcatgtgccatagcactccctaaccaaggcaacttctcagctcagcactggtgagacccccagctgctcagctgcaccttgtgccatggactttctgtgtctgccaccaacccgggtggcatcctcttggcctgccaggcagtgggaagcttatttcaaattcccatttttgcctgttttcatggatcacccttcatgccacttgtgttagttagggtcccctgagaagcggaccccaatacagtagtaaacatgtaaggatttattaggggaaatacttgtgagagaaattcatgagacagaaaatgctgggaaagccactggaccacaaagcaactctgagcctcagtgatgtagagagtgcaggaaggtcactggaagcatcctagaccctgtgcaggctaagggaagttcagtaagggtggcagggagccctggagcttcagtcagccttcagaagaggaatgtcctgccttagtttctgccctactttcctcaatcattggctggaaaaagccaggggtgggcatagtctcagagcaaatgtggcaatagatttcagacttcaagagctggggccatcatcaattctgcttcttctagatgaggggctgggatgtgcattctcatgactgccacaatgatccagtggggagagaggaaaaaggttgacgataaagataaaaatggtattaattgatgaactgacacctttaagtagatgataagggatggcaattggggcaccagaagagggtctggctctggctgggagcagaagggttaacccacaacagtccctcacatggtaaaacgcctgacatgtggtgcagctgcaaatgcatgagcagacagtggtggaatctgtgaagttgtcttctaatgtgttcagttttctcagtgaagtgggaagcaaggtcatcagctgaagtaagaatggggaaggcaggttggatgtgtgagcacaaagaaaaggtgtgtaagagtcacccaggccaggaggaggctgagggtgagccatgcagggagagggtgattgctggccatggtagggacttcctatgtggtttggaatcctaaattttaagagaccagtcagcgtactgtgtgctgctctccagcctcctgcagctcatgggggcaggctcagcataggcagaggtggaacccaccagctgtgtagttttgccaggtgagtgtgacaattcaagggagagggaagggagggatggaaattatttaccatagaattcaaaatgggtgaggagggaggacaggacacccagggtgagggacagtgagtagatggcaggatcactggattgggaatcccaggagggtggaacgattgttggaattgatgtactacagggtagactccaagcgtggaaagcaagcacatatgcaatgagtggtccactgatattacatcacagcatatgataaaatgatagtatctgtgtcctcagagcctgtggccaccttgcaaggggatgagtggaaagatggtcagagagtgggtagtgtgagatagagagtatggaagggctggggttcttagccatgatgaggcctaggggataacaagggcatgagattcaggcagacaggagaagatcatggaggagaggagttccaggatctgagaggccaggaagcgagggcatcttctctgctgtgtgggtgtctattgctgccataaaaattaccacaaaccaaatggctttaaacagcacctatgtatcatggcacagtcgtgtggattgcaagtccacccagtctcatggggctaagatcaacatacgggaaggtctgcattcctttccatagactctggggaagaatccacttccaagctcattcaggttcttgcctgaattcacttccttgcagatagaaaagaggtttccacttccttgttaagagccacccttagctcctagagccttctctcagatactcacacacggtgcctaaggcacattcaatcctcctgcttggaacttctgacctctcctctccagcttctcctctgccttcctcctctgcagaatctgactccaaccagggcaggctctctgcttttaatggctcttgtgatttgattgggcccacacagagagtccagcagaatctccctattttaaggtccttaatcttcattacatgagtaatatcccttttgccacgcaatgcaacctgttcacaggttccaacgattaagactggacatctttggggaccattactcagcccaccacatctgcgtatgttgaagtcaccaagagtcaaggagacagcaatgctggagagggtgacagtgaaccaggagctacaagactcaggattgagaagaacagcctggggcccacagggaatggttacagtgaggcaaatggggctctaatctgatgacagcctaggggttttagggaggagggaggcagaaagttctgagaaccacaatgaggagcaaggaccccacctcacctctgaacccaggggtacaagtccctggggaaactcccccatgtgggaggacttcggagggggtcatgtcctcagggagacccaggttgctgctggagctgtgagatgcaggaacatcctgagagaggctgaggaggttttgctgatgtggactgagaaatccagggggtgcactgggaagatttctgtggctggggaggtcggggagacagaatagaggtgtgcagagccttgtggggatgcaagtgcagagtatgtgggggacccagtgtgactgacacaaacagggacagagcatgatgagctcagtccaggtgcactccaggccgacgatggtgctgagcctgtgggggatgcgggaggaggagcaggggtggctttcacctgggctctgtccatggaggtgaggacagtgaggtggttgggtcttagtgctgtggggaacttttcttgacctcctgatgactggatggagtgtctgagggaggaagggtcttacaggattgactcatgaccctgagggatgtgctcactccaggtctcaggtctgtcctgacacctttatttgtggcttagagctccctactgtaaattattgggagttagttcattttggagtttataacttaaagcagaaattcagatggttgaaatgtcattttcatgaaggtttgttattagtgtatcatttagattgttttgcaacagtctcattttttttctaaagggttgccaatcttgttttaaatttacaaaggttgttaatttatcttcactgttaattggttgtgggttgtttaaacttatactgtgtagttttacatatctgtaacagcagtagtttgggcctcttatattctaataattaagactttcagctgagtacacactgtaattcaagcacgagtcatgcataaccctagcactaagagacaagaggggaatccctctctctgaaaattttgcaaaattctgggttctttttccactgagtgggcacaagtcggctaatcatgaacatgaggtatttgtcctcatttaaaggtgcttcagaagcactgacccctaggaaggcctccttgtctgggtcaggcaccctacaccatggcagaggccatcttccctcccagtgtacagtgatatcccagatagcttactggttagctgctgtccactcttgggcagttttgtcttctaaaacatgggtttttatctgagaatcttcctgttcccagatgatcaaaactggggccatccattccattctgagccacttctgcccaggggcccattgctatttcctccagtcacaacagaacaccccttcagaacagcctgcaggaaggccccgtctcctcacaggctcacacatgcacggtgtgtgcacagagcttttgctctagttcaggaggtgtgtggggagcctcactagtccaacagagcttggtaccagtgtcatatgccaggaaccaaggttataagggatacaatgtccccagacctaccagagaaggcaaactcatacagcttgcaggaccagacaaggacaagaacaagttcaaaagagggaaagggaaattatagacatacctcagagatactgcagatttggtttcagaccatggcaacaaacaagtcacacaaatttttgtttttccagtacatataaaagttatattcacactctactgtagcctagtaagtgtacaatagcattatgtatgaaagaactatgtacataccttaatttaaaattactctattgctaaaaaatgctaacggtcgtctgaggcttcagctaattttaatctttttgctggaggagggtcttgcctcaatgttgatgactaccggctgttcaagagggtggttgctaaaggctgctgtggcaatttcttaaaataagacaatgaagtttatggcatggattataaagggggaatcagtacttaagtaaggtcaatatgagttttcaagtcaggtggacttgaatatgaaccctccaggcctttccaccaactagctatagagccttgggcacatctggcccagagctggccccgacagacacttgcccagtgggtgagtgctcaatgaacccatctgagccaattgtctcatccaaccagtgatataattccttccttgcagaagaataagtgagaaaagacacagtgccaagaaattcagacacaagacctgcggaagtctgcgccagtgctctaaagcaagttctgcctaaagcggcagaaacatttttcacattaggaacaggagttgtttgggatcctgtctggggccaggttgagagcagagtgggagtgggggcctgggcaggaccaggcactggagtgaagacaggcctggagagagctgactcctggaggctgctgagcggctcagacagctccttgcctcacctgccacagtcctccctctcccctggcctccaagtacccgggagtgcgagcctgggccccgggaaccggcaccttgagggctggagagggaccccgcccgctccctgtctccctgacgcgctctctccgcctccccgcgggtacccagcctcccgggctccctcctgcctaccgcccggccctggagccgcttacctgggagcttcttacggtgtagggggagctggggaggggacagagggacagggaccacgggagggtggcgtggggcggcgtacttggagatatgacctgaggagtctgcagaccccagaccggggcagaagagccgtgggaggagctgctgagctctccaggccgccctttacctcctgcctccccagcccagttcatcttgatcctctcctcactagcccaggtctccccaaggtcagggctcatagagcagcaggagttgggttccgggacgcgggatccggcttctctgggaatcttggattccaggaaggatcctggagatctcccactttatgaagcccaatctccactcactgtgatggcgtctttagaccccactggaaaccagatacgacgccctcatcggccctggggaaaaaacaagagcaaagtatgagaggtggccatgaggtcagggaaactcctgcagaattctcaggaaaggaaactcttccgagctgggcccttggcttagtttgtcttccctgcccagccacctgtcccagagctggagacgcccaggtttaagccagagattttggatactttccttgatggtgacataatttttgtcttctctcctggaagagaagccccagaaccatcagagtgatccagtctgcccactcttcttattattctgtctctccaatcactctccctgagctggactctccacccaccctcacattctggatagtgcagagatgtgagcatggccctggggcaggattgtctgcgtgcaagcccagctccaccacgacttgtaggcgaccttctttcctattgtatcacctgaaaacggaaaattagcaggcacaccccatagatgtatcgtgacaattaaatgaattcatattttgaaagtgctaaggacacggattaacacatagcaccatgacagtgtatgatattatcgctgttggtttttttttttttttttttttttttagatggagttttgctctcgttgcccatgctggagtgcagtggcaccatctcggctcactgcaacctccacctcctgagttcaagcgattctcctgcctcagcctccagagtagctgggattacaggcgcccgctactacacccagctaattttttgtatttttagtagaaacggagtttccccatgttgggcagtctggtcttgaactcctgacctcaggtgatccaccctctccggcctcccaaagtgctgggattacaggtgtgagccaccatgccccgccgttgttgctatttctttcatcctttttgcttgagcctcttctcttctttctaggttcccagggaaattctctgttggaagattatgcctgcaagaggcctccacctgggaaatgctggcccatggggggatctcccttttattaaatggaatgattgttggtgaagtgacagctagtgagccagtgacagtacggttcatgtaaaaaagaccacatacctaggattacctccattttaataaagacacatcccacacattataagtccaatgtgatttgtgaggagattgctttgatttgctcacgaaaaatattactctactttctttgagagagttttgcaacacatttcaaatctctgcttctcatttcacactatctggctcatgagtgaaggtgataagtgtcgtactatgctctcaggtttgtctgtcagagtcatagtcatgtattacacataaagattattttcttgttatcatttatttatatatattatactcatgggatatagatagatattattacagtgcttaaatggctactactgatatctatacattttctctcttggtatatgatattaacacatagaattgtatactgttactttggtttccagcaattgctgattaggtcatttggaccacttctcccattgagtacaactggaaaaatgggaggaaaatacatatttgaaaagtctggttgaatttatagatgggctagcaaagcagtgaagatttgcttggccaggaaccaggaagaggcagaaatccagaagagcatcttgagctatggggctgcttttttggatcagatgcagtgacacctgcctcccaggcaagaagccaacttctgggattcagaactaaagtgtcccaatatttagaaggtctcttggtctctctagagttcagtgctcattggccagggctatgatactcacactcattccttggaggagccaagcttcgggtttggctgcctctgggacatttcatgctagaaaaaccccaacatgtgtagataaatggtatagaggacaccagccacccttcgatggagctctgcccagtagtgtcccctcccttccactcagagacaacatgcccatttcactaaattcatgaggacatggccaacataagtaagagaacaccgggaggtacctgggacagagttccatgcagtcacagcttttgcgtctctgtgtcttttcccttcatctcaaccagagagcatttgccgaggccgaagaacaaaaaacttcaaatattggagcggaatctaagaccactgatccattgtgatcaggaggctggagccatgtggtccaggaataatgaagtctgtgaggccttggtcaccccaaggctctctcccattaggagctgcctctcactgctatcagggaggacccaggagctggacatggctttttttttttttttttttcatttctgatgagaacctggagaggtcccagagcatatagaccttgattgaaatggggccagagtggagtcaggcaaaaaactctaatgactcagaggcacctaagtataaaataaaatctcaactcagagcttccatcagagcatcaggctcagtatctcctgtgtttgcactgtgagtactggagcttgatgagaagaaaaatagctacatgtgcagaaaaacatatgtagttagaaagctgggtcatggttcaaggtaagagggacccttgtcttttccgtggtagatagtggggctttctgccatcttagttctgatggaccaagtgcagaagataaactttcctgctttcagcttagtgactggtaatagaagctggagttaagagaatcagtggcagcctctctctccatgccccagcccagtaaatctaagccaggacttggggctctggcactttcttctcactgtgcgtcctccttctctggctcaaaagagaaccacatgtaacagaaaccaagggctacaattctcacagaacccagaaaactggactaggggcctagagagtcatgtgcctgccattgttccaccgcttacgtgctgtgtgacctcaggagaagctctctgctctttgaatcatctgtgaatcatggacaaacacctccatgctagcaacattactgaaatgcagggaggaacaagtgattcaattgggaggaaaaaaaacaaagtgatgacatttactcctagacaaaactttttaggaaaatgtatcttaaaagtaggagaaaaacatataatacctgcaatcccctgcaaaagaagcctctttagcttactacttgttcatcgtctttctgtgaaatttgggcaaaactagctccctcattatctcaaataaattaatgcagttggcgattctatgtcagtttaggtctacaacttttgctttgtgtgaaactgaaagggaatgggaacatcttcatttttctgtggtggccaggggacactcagaggcttggaaatgaccctatatcatctattttcaattgcctcactctatcttttgaaatctcaggtaattcatactcctaaaaaaatctcatgttcatacataggacaaggtagaaaaggtaatattcctgttttaatttgctagggctgccataacaaagtaccaaaggctgggtgacttaaataataaatatgtgttgtctcacagttccagaggccacaggtgcaaggtcaaggtgctgcagggttgatctcttctgaggcctctttcctttgcttgtagatggccacttcttctgccttctcaacatagggcttcaacatgtggattttggtggcgtaggaacacaattcctcttgtaacagtctggatcgtctttgacaatggatgttctaaaaaataaaagagagtaatagacagtacaaccctttggctgaaatctttctcttggttttctaaaattttggtcttgcaatagaaaaaacaagaaagagaaccaaagtttagttcttcccggaaggtgaggcctcctccctaagtctgtgtaatcccagacactaagacatggtgctgtgcagttctccaaagtcctactcactccagtgattctgtttctgtctttttaactgagcagaagagtctctttcaggagagcaacttcttctgatgctttatgggctttattctccttaaacttatggaatgaaaaagatcttaataaaaaggaaaatatttgccaaatttttatcatgctcataatttttgtacctttttaaatgccccatattgtgttgtttattttttaaattttttaaaattggtacataatatttgtacatatttatgggatacatgtgacattttgatacatgcatagaatgtgtgtatcagtcaagatatttagggtatccatgacctcaagcatttatcatttctttctgttgagaacattttaaattcactcttttttgttttgttttgttttttgagatggagtctcacaccatcacccagactggagtgcagtggcacgatctcggctcactgcaagcttcgcctcccgggttcacaccattctcctgcctcagcctcccgagtagctgggactacaggcacccaccaccacgcccggctaattttttttttttttttgtatttttagtagagacggggtttcaccatgttagccaggatggtctcgatctcctgacctcatgatccaccctcctcggcctcccaaagtgctgggatcacaggcatgagccaccacgcccagccaaatccactcttatagctattttgaaatatacatttttgttaactttagtcagtctgctgtgctatcaaacattagaacttattttctctatataattggacatttgcatccattaacctgcatctctatattttcccacccctacattcttcccagtttctgggaactgtcattctactctctctacctccctaagattaacctttttggctcgcacatattagtgacaacatgtggtatttgtctttccttgcttggcttatttcacctaacgtaatgacctttggttacatccatgtttctgcaactgacaggatttcattcttttttatggctgaattgcattccattgtgtatatatataccaccatttattcattcacccattgatgaattcacccattgatttcataacttcgctactgtgaatagtgcttcaataaacctgggggtgcaggtagtcttttgatatattgatttcttttcctttatataaatacccatgagtggagttgttggatccaatagtagttctattttttgttttttgagaaatcattatactgatttccataattgctgtacttactttcccaagagtgtacaacagttcccatttctccacatgctcaccactatccattattttttatttcctattagtagccattctaaataggataagatgatatttcattatagttttgatttgcattttcctgatatttaataaggttgagtgtttttcgtatacctgttgaccatttgtatgtctccttttgagaaacatctattcagacactttatccattttttaattggattatttgtgtttttactgctgagttttttaagttccttgtatattctagatgttagttccttgctggatgaatacatagcaaatattttctctattcaacaggttgcctcttcattctgttgattgtttcatttgctgtgctgaagctatttagtttaatatagtcccacttgtctattttatttttgttgcctgtgcttttgaggtcttagccataaagtctttgcccagacccatgtctggagtgtttcctgtaagcattcttctagtagttttatagttttgggacttacatttaaatctttaatccattttgagttgatttctgtatatggtgggagacagggttctagtggtattcttctgcatctggtagcattttcccagctccatttattctccattgttgcttttgttctttctccattgtatattctttaccaaaaatgagttggctatcaatgcatggatttattgtgagttctcttttgtattccattagtctatgcgtctgtttttatgccagcaccatgctgatttggttactataactttatattgtattctgaattcaggaagtgtgatacctctagctttgttcttcttgctcacgattgctttggctatttgggatattttatgattccatatgaatttcataattttttctatttctgtgaataatgatattggtattttgatagggattgaattgaatctgtaaattgctttgggtagtatgaacattttaacaatattctcccaatttatgtgcatgaaatttatgtgtttcattttttaaattaatatttaacaatattaattctcccaatttgtgtgttttattttttttccttagagacaaggtctcactatgtttcccaggctagtcttgaactcccaggctcaaacaattctcctgtctcatcatcccaaagtgccaggattacaggtatgtgccactgcgcctggctcttccagttttgtgtactcttcaatttccttcatcagtgccttatagtttttgttttacttcctggggtaaattgattcttagttattttatcctctttatgatttgtaaatagttttgctttcttgatttcttcttcagattatatggtgcttgtatatataaatgctctgaaagtttgcacattgattttgtatcctgtaattttactgaatttgcttattagttctcaccatttatttggtggaatatttagatttttctttctttctttttttttctttttttgagatggagtctcgctctgtcatccaggctggagtgcagtggcgcgatctcggctcactgcaagctccacctcctgggttcacgccattctcctgtctcagcctcctgagtagctgggactacaggcgcccgccaccacgaccagctaattttttttttttttttttttttttgtatttttagtagagacggggtttcacaattttagccaggatggtctcgatctcctgacctcgtgatccgcctgccttggcctcccaaagtgctgggattacaggcgtgagccaccgcacccggccaatatttagttttttctgagtaaaagattatgccatttgcgaataaggctaagttggctttctcctttccaatttggatgccctttatttcctcctcttggctgattgctcttgctaggacttctagtgctgtgtagaataaaagtgatgaaagtgggagtcttagccttcttccagatcttggaggagaggctataagcttgtccctattcagtataatgttagctgtgtgtttgccatatatggacatatcatggtgtattattcttttggtatactgttggattttgttgctaatatttttaattattatttttatcagcaactttataatttttattataagctttttaagcttataaaatgtacatataccaaaataatcagatcttcatcaaatttatcaatgaattttgaccaatacagcatattactcttgccactatcaatgtacataaagatccctttttctcccttcaactcagcttccatgcctccagcagccattgatctgacggctgtcaggatagcacagttcttcctgttttaaaacttcatacaaatctactcatcccatatggcctcccttgtatctggctttttgcgcttgttgtaatacctatgtgatcaatccatgttggtgcacgtatcagtagttctttcattttcattgctgataatattccattgtatgactgaatcatgatttttgtacattggcagttatttcttgttttttactattataaataaagaaactatgaacatttttatgcagggattatcgacaaaatcttcatttctcttgagtatatacctaggagtggaaatggtagctgtagaggactagcttgtttaactttattagatgatatgaaattgattttcaaaatggatgttttatattcctataggcaatggaggagagtacagattgttccacatccttgctagcatttatagttattaatcattttaattttagccattctaatggttgcttagtggtttctcactgtggttttactttgcatttttccctgaactggccattcatatatcttcttttgcaatgtttcagatttctctacagattgtggaaggtgctaaataaagatgagtcctctttctctagtgctggacctaaagcagaatgttcagagtccctccacatatcccaatccagccaaccacataccatgtttgcctccagaagctcctactccttcatccgtctttcacggtctatcacttcattctggcttaagctcacactcctccaggaagtcagttactgtgaaggtcactaacatgctcagtattgtcatgtctccacctgtctttacttctctgtagctttcctcacactcaacgactcctttttattttgctcaatttctgtggattcacttcacaaattttattataaggtagttctagctagaagaaaaaatagagaattataagaaatctttgtgaagctgccacccaggtttgtcaatttgtgacattttaatattattggctgtatgtagtatacatagaaaataacagaaacacgtgtagatagccctgattttccacagttctgttatgcatgtgtttcagtcaatactgtactgagcaaagcaagaactgttggtgaatgtgtgtcttgaatttgctgtatgcccctatattcttactaagttttaaaaagtctcttgtttttgtttgtttgtttgtttgtttttaacatggtttcactttgtcacctggactgaaatgcagtggcacaaacacaactcacttcagcctctacctgccaggcttaagcaattcctcccttctaggcctcttgagtagctgggactagaggttcgcgccaccatgcctggctaatttctgtattttttgtagagaaagggatttatcatgtttcccagacttgtctggaacgcctggggtcaagcaatctgcccaccttggcctcccaagatgctaggattatgggtataggcccccttgcctggctttacttttagactttttataaattgtttcttgctgattttgttatgcatttgcttgctttttccgttaacatggtctatgagagggatcaatgttcacacaaatagttcatttgttttcattgctagatagtattccatgggaggaatatgctacaatttatctcttccccacttcattgacctctacatagtctttattaaagacactgctgcaatgaacatgctgggacattgttttctggttccaagaatatgtgagctcccctaggatatgcatgtaagagtggggtcactgcacccttcccatatgatgctacatgatgtcaaattgttctctgaaagaaataatccaaatgtctatcagtagggagctggttaaaaagcattgcattcaaaaagggtaatctctattttaaaaaatgcatgcctatacaatggattgccaagaaatttttgaacaaaaaaaagaaagacatagtgtagttcttgatatttcttcatgggatggtctccgtgatacaatggtaagggaaaacagcaaggtacagaaaagcatatgtagtttgctaaaatttgtgtgcaaagggagaaagaacatacacatatacatttatatttgcttgcacagtcacaaaatacctttgaaagaataagcactgcctgatgagtttggagtgagagatggtcaggatgatttcccgcacagtcaggttgtttgaagggaggggaaaagagcaagcagcaagttttgtgtttctgcaaagacagagacagtgcaggagacactgagagcctggagtgtccgggaaacccgagtctttctgccatttccccacttctgtgtatctggcagggggtggtgatttctcatccttgaacctaattgcactgtcagttggcccctcaggcctgggcagatgggatggttaatcccctgccctgcagcaagagggccctgtccaggaggcacccacagcaggggcagtgcaggtctgtggtcgctcctgctctcacctgtggtgtctcctgaagagggattgtcagttctggttccccgtgggcgggaacggttgccttgtaggttactggggcactggccaggaaaggggtgtgaaagttatgtgctaatttctcaaaattcctgctttaaatgctgatgtccaataaagatgttcgtagtttcagctgggtcttaaaaggatttccaccaatactaatgttgtaacctatatcaaatgaaacaggaactcaaatgtggagctccctctccaggacggtccatgtgggagacagtggctgtggcagtggcaatccccaagtgcaaagggtgggcagaggcagcctcaggctgaggggtctcaagaaactttctactccacagggagaagaagatcccctatgggctgtgagggcagtggcttgggtggaatccctgctaggaatccctgctaggaacaggagaggaaggcctttcagcctccccaagcagcagccctggggagaagctgtgcttccagggatgagtggaccaggctggagcaagcatggcccaagtgcaggtcatgggcctgggggtcagggtaggctccttgagcaagggggttcccagggtcaggtcagctgcagaccccatagcagctacatgtttccatgctgggcctgccatgctgatgggattcttaatgggcttcccagttaggagctgcctgctcagggctggaagtggaggagcactgagctgcaggtggagggcagaaccacagtgtttagggcctgcctttgtgtgcaggtgtctctacaggtgaggtgggactggggactgaggaagagaaggactgtgcgtgtgacccagcccagtcctggaaggacatggagccagggccagagcctctctttggggagtcctcctgctgtcagagctggccaggcttgagaggaggggagggcactgggtttttcccaggtcttgtcctttggtcctggggctcttttcctccttgcatggtggctggtgggcacagggcaggggctgatgttgatggagtcacgggaggggactggcaggggctgggaaaagtgccatgggagggagaaaaaagtgcagacatcatcttccctcggagaaagggtgaatctgatttgggactgactgaggagggagaagtcgtcagggagtaaaaagcagcactgtgcacccaggggagcacttactattttctctcttttctccagagcacatgagcctgcaaggcccagatcaacacctgactcagacagaacaccagggcagtgcacagctgggatttcagtctctgctctcagctcccaggtccactggctctactgagggcacctacactctgcagccaggcggcctggattgaacgccctgcccaggtctcaccagcactttttctcttgctggctcagctttctcatctatgaaatagggaatgtaacaacatttatttcttgtggttgggtggatgaaaagtgttagtatatatgaggtgtttgcagctgtgccatattatttttgttattttgttatgattttattatattttaatacattaatgtcatgtagttgtattatcacaggtgagctttatgagtgagtgtcctggtgacggctcctccggggagccaaggaccaactttcctggcacgttgaggtcccctcgccctgtcacactctcctgcattaccccattctactctgtcttcatattttatactatagatatttagcttttaaatagacatttctggtctgtgttttatttcaagtgtctgggaacagatagagttgaggttcaagggagaatgagagctctgtctagatgcgttgacatagcacaaagaaatctcccctcctccctgatatctccccgccagttctcagggaaggacagattcagagcaacacagacaggtctggaaagggatggggggacatctgaagcaaatgttcagggcctgaagctgtgagagtacacctgccctacagagttggagccctcatgtgatgatgcagagctgaagtgttatattctggaggggataaaaagtgctctggggtttcctgattatgaagggtaggggtcagtctgcttctaggagatgtggactgaattagtgaaaaataaatgcacagggaatgaggatgagtaaagcaagcatcagcatctcccgccatcagttcagactgattcggaggtggggaggtgggatagttcctgaccctgttgcaaggtttcttttgactttctggttttggggcacatagatggctggtgctcttcttggtcagggcggcctcagctccacccaggtaaggcagtggtggcagagagttaggggagcacctatgaaacagaccaaggcagggatgggagcccttggtgcagcaggagtgcatgcaggacttgcctggaagcaagagtattagggaccctagtcaggtcctggtcccctccctgcctaggctcacaggacaaccagtaaagatgctggagtggggaattcattcatgggctatctatccagagttgtttatagacatattctttcaagtttgtattcagggttgatgtcacatacacatttatacatgctgttttatgtttaagtgttttttttttttttttttttttttttttttttttgagacggagtctcgctctgtcgcccaggtcggactgcggactgcagtggcgcaatctcggctcactgcaagctccgcttcccgggttcacgccattctcctgcctcagcctcccgagtagctgggactacaggcgcccgccaccgcgcccggctaattttttgtatttttagtagagacggggtttcaccttgttagccaggatggtctcgatctcctgacctcatgatccacccgcctcggcctcccaaagtgctgggattacaggcgtgagccacatgtttaagtgtttttatattttggttagccctttatcattgttaaacaaagttgtcattaggcataaacttgcatgttaactgaagcttttgtttttattttattcgaagttacaattgcacataatggaaagagtaaatatttgtgcaggactttctgagaaaaatgagagtcttctctgcctttctagggagagtcctctcttctctatttctgcctttctagggagcaaccactttcaagtttcagctgattcttttgactttactttcacatatctaagcaccaaagcaccatttctttattaacattgcttgatttttcagttgcagccattgactattgcactgcacgatggtggaatcaatagttaagattacttgttctctttctttttgtatttttttcttattttttaatttatttaaataaataaaaatattctacctccccaaaacccctcaggacccacacacaggcactgcagcagcgacaggaggagggggcgctgggaacaggaaggacaccaccgcttggcctccggcaccggagggacaacctggagggctccgggagcaccgcaaaggtccaagcggagccaatcctcacaagcccagggaagggcaacgtgacaggccggcgcgacagccccaccgccgcgaagaggggctgcccaaaaggcaacagccataggagatgagcagggtgcctactgcgtcggagaactcatctccccaaccccaccgatgccacaaggtagagggcgaggacagcgaggtcggccggattccgcacccctgcctccaaccaccgcccatgggcggggaggagagactaccggccgcaagcagaacgcagaacgagaagagcggtcccgttagccatgaatgtgtccctcatctgtaccgcctccggccccgcccgggagaacgcgacgtcaccacatccatcacttgttctctttcactcttcccgttctttccttttcccagtatatttatatagtaattatgtttaattcagccactccttgtttttttccgtgactcatcttctcatatgtcaacttgactacttttcacttgcttcgtagtatttgttcttcctcaagttaatacttgcctttgtttttgtttatgttctagataactctcattaatttaactttgatatctgttccatttctgtgactctgttaagaaattagagactttgaactttctattaattttactttcttggaaatgtccctcttgggcccttctggctgctcccatctggactggaggcttctacctgtgggacagagtcaccttcctaggatctccctccaccaccatctggggcggtgctttacatgcagtggagccacctggggtcctgacaaatgcagactgatcaacctgtcaaggctgggctgtgagctttctgtccagtttcatgagatgctggttctgctggttcatggataatagctggggtagcaaggatctctctttttgtctcacagttttctgcatctctttttcatagtaagcacatgctaatatattttcaataaattcatgtgctcttttcctaagttggtatcagagctaattatttttttcattgcgccaaaatccatattatataaaatttggtatcgtaacaatttttaagtatagagtactataatatgaactgtagcacattgttatgcaacagatctctagaacttttcatcttgcaaaactgaaactctacgctgaaaatctcctcatgaatccccccagcctaaccactggcagccgccattctactttcaggttctaagagtttagacgccgcatataacgaattgcgcagtattggaatttccttgtgattggcttattacacttagcattgttctccaggttcatccatgttgcagcatgtaacagaatttccttctttttaaggttgaatcatattccattgcctacatagaccacatgttcttcatctattcatgtgttgatgggtgctttgtttgcttccttgtcttggctatggtgagtaatgttgctgtgaatacgggtatgcaatgtttttcttttttacagcctccctcatttcagtggaattaatgttttagtagctacttctgatagcacatatttaaagtatttttgcatgcatcaatgtgtccattgttgttttgattctctcctggaagaggatggaaatgtatgaaggtgctgtttggcacagtatttaatggtgaagaagagacggtgtaactgaccagtgctgggtctcagcatcctgcaatttcagaactactgtgaatgcaaaaataattaaaaaaaccagtgctgcccagaaagggggagtcatccctaaatatggcggccctgggacagctggcctccctgccaggcctcttccatgggggcccttttctgcagtgactgggatttctttccatttcactctaccctgtgtcctgacccaagagacaaggcatgtctgcagctgtgcccacacttggagtgtgtcagtacattataaacactggctcagtggtgttagtacattataaacattggcttatcatgggttattttattatttattgtgtattttgatttcactttactggcaacacaataaacaatgacatgatgaccctagcagtcacatcctctttcttgtgtcaaaaagcaccttccaggaacgtgagaaggagacagttttcgctacagttgattaagggagagcccgctaggctgggcaggaggatttttaccgggaacctgtgcgatgagctgtgacatccttctccccaccttcaatctcagccccagcaggcacctcctgggcgcagaagcagtgcagcggcgccacctggcggtctgcactcttcctttcccagatcaagcacagccctgaaatccacctgtccctcctctgtgcctgtgatttcttcaggggacaccagcgtgggtcaactttcttgtaaagcagaacaagcgtgagattggaccatgttacaggaggaatggtgtcatctctacctgtggagagatccctgtcaccgtgttcaggggaaggaccgagcctcactcccacgcagagaggaggctctggttgtaactgctccagtggagagatgaggacctcctccctctacactgatggccaaagcctgcagactgggccaggcttcccctcagctatgtcctgtcaggttcatccaggactcaagaaataaactgtggacattgtctccagcgacgtggagctgaatgcacactcagtaatgagacagccttgccaggggtcctggggctgccggttgttctgggtgctcagtgtccagagaggaggatggggaggaggctttgtgcagaacaggaaccgtggagctggatgcacactcagtaatgagacagccctgccaggggtcctggggctgccggttgttctgggtgctcagtgtccagagaggaggatggggaggaggctttgtgcagaacaggaaccgtgccccataactcattttattctgcgttcgcctttttgtcataaaacacaggtgacataaaagaaaaaaaatcttaaaatggtgacctttaatcaacagtaaacactctttaaccatcagaaagagagagaagtttgtcagctgacctagaagccccatcaattgacccagttcaatagtaaatttttattttttcaaataaaaatcaatcacatcctgacttttgtggtcctcacttctttgttctattttatattttcatcatcccaaatgatagtttagttttacctttaaaaataagttttttgttcttatttgttctataggttatccctttgaaattaatattgtctggtagagtttcctgttgtttgtattttgtggattgcaccccaaactatggtttaatatgcatctctattacctgcattttctagaaatttgtagtttggtatagaggtttgcatctattcagatttttttccccgtgagttttggtggtactatatcatgtttttcaacaaggggaagagtttaatactggttatttccctttggtgatgaaaattgtcattgctgttcagtggctagatctgttcattcattacggatggcaaagagttgtagtctcagtcttccatttcttttcatgtattatttgaataatttgtaaaataagagacttacccccttctactatttacctattataggaaaatcacttttaattaattagatgtgaaaattctaagaaaaatattagtagactgtattaaccaatgtgttataaacagactgtcttgaccaaggtatatagcccaagaatgcaaggatatttaaactttaaaccttttaatgcattttgccacttaattaaagaataaaaaacagagatgatgttattttactagattaagaaattattctagatgaaattcagcactccatctgacccatatttctccagtcatctccaggttaaagaaatcatgcaatcagattggggccactcaaataatacaaaataatctccacatctaaaggtccatgctcttaatcatatcagcaaagtcccttttgctgtgtaaagtaacatatctaaatggtctgcgtcttagggcttggacatatgtgtgaggccattattttggattccacagtgtatatggtggttgaatgaggtttaatttaattcttctctaattaaattcctagaagaagagaagtgagtaaatggaaagaggcattccagaaagaggttatcttaaaatattaaggaaatgtattattgtaaataaagtcttgatgccacaaagaaatagcactcaaatataaaattttctttttttcttctcagcaaggcaattacttctatacaagggtgtgccctcacagatggagcaatggtgagcacacccctggacaaggaaggggaaggggttcttatccctgatgcacgtggcccctgctgctgtgttattcccatattggctagggttagaccgcacaggctaaactaattcagattggctaatttaaagagagtgaaacaggtgatcagaatgagtcagggtggtgcaggtaactggaatgagtcaggctggggcaagtaatcaggatgagtcagggtggagcaggtaatcagaatgagtcagggtggagcaggtgactggaatgagtcagggtggagcaggtaaccagaatgagtcaggctggagcaagtaatcaggatgagtcagggtggaacaggtgatcaaaaaaggttgctttatgaggaagttaagtttaaaagtagagggcaaagaattgaacatactgacatgttaattattttaagagaaatttagaactcatacctaacagtatcatagcactgtgaataaaaagagatccacatttactcatactgcactggaacagaagatgttaaagagaaacagatatcttaaaatttgccacaggagaaacacagatcctctaagaagcaactggttaaaatgtaactgactattccctgtcagccacagcagccagaagcaacataatcatcaaagatctgagagaaaaccaatgtcaaactagaaatttgcagctgacaaatctctctttgatgaataaaggtaaaacaaaacattatcatataaatgaaaccgttgcactgtctccataatacccaatctcaaaatatctacaagaacagagaaatatgtaagaacaaaagagagaaagaaagcagaaattttaatttgtaatctttggtatatgtaactcagtactgtcataaaatattaataatgtagctttcaaagaaaaaagtcatgtaaaatacataacatgctgtgttataatttctttatttatcttcccacccccacctttgacttctatgaagtccaaggaagtttgattcttttatctgaggctcaactccatagagcacagtacccagaataaggtaggtgcttaatgatgtttaccatatgaatgagtttcctggaagtacttagcagatcaggaattctgatgcataaacacaattcaaaggtggctgaggagtgacatcagagaacatagtggcataggaactccaagggccacctctgcacagagacaatgtgcttgtaaaacatcactataaaaaaaatcccttggctgggcatggtggctcatgcctgtaatcccagcactttgggaggccgaggtggggggatcacctgaggtcaggagttcgagaccagactgatcaacatggagaatcccagtctctactaaatatacaaaattagctgggtgtggtggctcgcgcctgtagtcccagctactcgggaagtgaggaaggagaatcgcttgaacccgggaggcagatgttgcagttagccgggatcatgccattgcactccaccctgggcaacaagagcaaaactccatcaaaaaaaaaaaaaaaaaaaaaaaaaattccctcagagagctgttaaagcaagaattcctggacctaccaccagatattctgattgggttgataaagaatcaactgcattggaaccctgaaaaatcatcaaaggtttattgcaacctagcaagtccagaaaaatcaactggaactcaggagcagagctttgtggcaccatatcttacccttggcccattcctccctgttcaagtcagtagtgatcttgaagacagcagcctggttccttagtgtgggctccaatgccagtgggagccgagtggaccatgttctcaaagtgttgtggttgtctaccttttcctgttgggtgactccgtgaaggatgataagaaatggcttacattgggctgggcatggtgactcatgcctgtaatcacagcactttgggaagctcagctgggtgcatttcttgagttcaggagtttgagaccagcctagacaacatggtgaaactccatttctacaaaaaatacaaaaattaactgggcattatggcatgtgcctgtagtctcagctactcaagaggctgaggtgggaggattgcttaagcccaggaggttgaggctacagtgagccaggatcgtgcaactgcactccagcttgggcttcagagcaagaccttgtctaaaaaaagaaaaaaaagaaagaaaaagaaaataaatggtttgcatttattttccctactcagaactctcttaggtcacagaggcagagggcatctgctaaaaccatttaagtgccactgaaccagcagctgcccccttggggcaaaaatatattacatgaggaaggtaatagacatacagaaaagcctggaggagaaactgggtgagtgagatgggaatatgggttttgaaaagcttccatatccctgggaatctgtatagcctcctccatgaccagtatgtcgcacagactcacaaagcacctgagaatgccctgtgttcacacctcttgctaactttcaatatctgcacaagtaggaaatgaaggccaaagcaggattgtaaactgcccagcagagtgttgagggcatgccccaaaacacacagagagcccagataaaaagattgaatttttttttcttatttctttttggctgaagatgtttcaggaaatatctatcaaatcatgagttgaccactaagcttacagaatagagacttcagtgatgacacacaataaagaatacagtctatacaaaaatagtttagaaaacatgattttcaaagtcaccacatgttagtattcaaaataaaaatgaggtatgcaattaaactagacagtaagacccattctcaagaaaaaagagcaattgacagaaactgttcctgagaaaggccattgaacatacttactggacaaacactttgaattgactgcttaaatatgttcacagagctaaaggaaactatgggcaaaaaactaaaggaaatcagaagaactatcttaactcaaatagagaacatcaataaaaagatagaaagtttaaaaagaaaccaaatagaaattttggagctgaaaagtgcaataactgaaatgaaaaatttactagagtaattttactattttttactatattttactagagtaaatttactatttacttttttacaaaagcaactttcactatgcagaatgaagaatcggcaagcttaaaggtaagacaattgaaattatccagtttgaggtgcagaagtaaaaaaaaattatgaagaaaaatgaacagaacttatgaaaactgtgagacaacaccaagcatatgcattttgggaatcctcaaagaaaggagagagaaaaagaagaatggctatttggaggaataataacttcaaatctcctaaatttgatgaaaaatataattttactcatccaacaaacttgatacattttaagcagcaagaattttaaaagtccacactgagagacgttataatcaaccagtctacaccaatgacaaacagaccatcttgaaagcaataacagagaaggaacttttcaggtacaatggatcctcaataagattaacatacaaattttcatcagaaaccatggggttcaggaggcgttgggatgacaaatttaaagctgagaaagtaaaaggactatcaaccaagaattgtatgtctgcaaaactctccttcagaaatgatggagaaatcatgacattcacaggttaaaaaaagctgactgagattgtctcaaccctacaagacatatatatatacacacacacatatatatatttgtaattcctctcttgtttttcctatttgatttaaaagaaaatgtccatcgaccaatgaatggagaaacaacatatagttttttcctacaatagaatattatttggtcataaaatgaataaagcactggtatatgctaaaacattgctgaatcttgaaaacaagacaagtgaaggaagccagtcacaggaggctacataacttatgagcccatttttgtgaaatattcataagaggcaagtcgatagagaaagaaagtggatttgtggcgacagggtctgctggcaggtggaaatggagggtgactgcttaatgggtgcagagttccccctgaggtgataaaaacactctggaactagagagtgatgatggttacataacattgtgaacatacgaattgtcactgcattgtgcactttaaatggttacggtggtatcctttgtgtttatgtgtattttaccacaatgaaaaagaggctgaggaagatattccaaaatcttttgtatagtaaactcctgagtttgcttgagaatctgcctatctgtcttttcttctcaggacatcatctcctacccagagcacacctttgttcttctgcaagtagaaagccctctttcagaacattgtccaagatcagccaggcccaaccctcaaaatgactttctgtctttgacccaaatgctcaaatacaactctggggctaatttcagtgggagtaagagattatccaatcaggataattcatttggagagaaaatgttttgcttaagtcagcaaagtcctttgctttcctaaaaaggatcctgcttaccagtgagtacagactttttgtacatttgaggtggagttctcagcagaataattaaagattcctgtagaaacaccacacacattatgtatagctgactgattcatccctctgccacccccaattgaaggaaggagctgtattcttatcttggcccatccatcaactgaatgccgctggacatggaacattgcaagtgtgaagcttccagggttctcagttgctcttcctgctgttgcggagactccactggtgtggctcacatccaggcaggcctgcaggagctctttcctaattctcaaggccaacattttcagtgaacccataccaaacccctaggttctcagggactcagattttcatctgtggaagaaaagaatccatctcactctctcaggtgtgatggtaattatatataatataatgtatatatacataattataatttatatatctataaaagagataatcagtattccataaattgatgatattcttagtgttgacttcattgcccaggtgaacactgtaacagaaggatgagtcatggattgtagaggaacaatattttttttactctctggaggagccatcagtaggcatttctgccatatggacttcaaatgagaaatttgttttaggttgagattggaaggagatctgaacttctttttattattattattttaaatatgaggtctcactatgatctccaggctggagagcagtgactattcacaggtgtgaccatagcctcaaatttgtgagctcgagccattctcctatctcagcctcctgagtagctgggactacaggtgcccaccacagtgttcagccacttttcattgttattttacttcaaatgttttattttgaatgttaaaaatacatgtttctacattagaaatatgaaaatgtatttgattacagaagaatttaaaatgcacatatcaacacgtggttgaattttaaagaaaaaaaaatgcagagaagaaagaaatatcacccaggcttcccctccaaagaaccactgctatcgtattattgaaacttcctggactgcagtgtgaatggtcatccctggagctatcttctgcagtggtgctgatttccattcttttgttttctatgtatatatttttatatatgctttcattgtagaaagttgcattcataagttttggggttttttttaagatggagtctcactctgtcccccaggggctggagtgcagtggcatgatctcggctcactgcaacctctgcatctcggatgaaagtgagtcttctgcctcagcccctcgagtagctgggattacagatgtgcactaccacgcctggctaattttgtgtttttaatatagatggggttacacttgttggccaggctggttttgaacacctgacctcaagtgatccacccaccttggcctcccagagtggttgtgggttattttgaagttgctttttgaatgtattattatgaaagtagttttccatgtcataaagtctgcataaaatttacacacttctagaagctgcatcccatctcaaacaaggagaagtcagcagggttcttttagatccatgtgctttcatcttgtcttttggtaaagaatattttgacaagcatgtttgtacatgaagattcttctatggttgtgattttaaaaattcatagaacactcaggatggacatggtggctcatgcctgtacttccagcactttgggaggctcaggctggcagattgcttgagcccctgagtttgtgaccagcctaggcaacatagagaaaccctgtctctacaaaaaattcaaaagaattagctgggcttggtggcacatgcctgtagtcccagctacttgggtgtctgaggtgggagggttgcttaagcctggaagattcaggctgcagtgagccatgaacaacactgcactccagccagcaagcccagtctcaaaaaaataaattatagactactcaaattgtaagtattaaaccagtgtctgtgagagtttttctggaagggatgtgagtgggtggactggtggggaagatcctctctcactgtgggcagccacagtccaatcacctagtggcccagatagaacagaaaggtagatagaagtaaaatttctctctgtctctgtctctctgtctctctctgtctctgtctctgtctctgtctctctctctggaactggggctgggacacccttcttctcctgccttggacatcaaaactccaggttcgatgatctttggactctgacttttgcaccagtgagcccctttatcctcctgttctgtattctgggtcctcagggctttgactttggactgagccacactactggcttttctagttctccagcttccagacagtctatcatgggacttctcagcctccataattgtgtgagccaattagcccaataaatcacctatctatctgtctgtctgtctgtctatctatcatctaacatctatctatcatctatctatctattatctatctatctatcatctatctacctatgctattggttctttcgttcttggtaaccttaataaatcaacagacaataaacaaataaaacctgtcacagtatcactgataattgccattaagaaaaatatgcttgggttagaagattggtggcagtggtgggaatggcaggggatagatttcagaagaggtcactggacaagacatttctgaacacttgaccatgggacatttgagcagggaccttaatggtgtgaggagtgagccatgtggatcactgggcagcacatgcatgtgggagtcacagcaggggcaggtggtggagacagggtggagtagacaagaaactggtgtgagtggagaagagtgagctaggctgagagtaatgggatgaggccaaagtggccagaggggaccctgtgataaggagtgcataggaaatggtgggaaactggggtttccttgtgcctaagaagggaaggagctggagcgttcataggatatgctctaattcccattggaaaggcacgctctctctgttgtgtgggtgatggacagtgggcatgagagtcagcaggcagcccagctggaaggcccttccggttttctatcctagtgatgatggttctggggtggaggtggcagaggagtgagaagtgattggatttggtgttgatatatattttttaaattgtggtaaaacacacatactatacgatttaccttctaaaaatttttttcagtgtacaattcattggcattaagcacatttacaattgatggtggttacacaaacaccaacatgcattttcagaacattttcatcatcccaacagagactgtacccattaaatgacagctgcccattgttcctgccctcagcccctggtaacctgtattctactttctgtttttgtgaatttgcttattctaggtgcctcatataagagaaatatcatatttgtcttttttctggcttattttatttagcgtgttttcaaggttccatccaatccaaatattcttcacttttaaggctgattaatattccatgtgtatatgcaccacattttgtttttccaatcatcctctgatggacacttgggttgcgtccaccttttggctattgggaatagcactgctatgagcatgactgtacaattatctgtgtgcatacctgctttcaatttttggggggtatacacccaaaagtggaattgttgcttcatatggaaattctatgtttaccttcttgagaaagcatcatcctgtttccatggtggctgcactgttgttcactctcagcagcagtgcacaagcattccattttctccacatcctcaccaacacctggactagtgaagctgagcatattttcatgtccttattggaattccttatttttatgtccttactgtgtatcttctctggagaattgtctattcatgtcttttacccatttttgaatgagattgttttgctattgttaagttgtagttctgtatgtagtctggatattaattctttatcagatatgtgattggcaaatattttatcttattctatgcagtttcttttatttttactgtctttttttgtttgtttgtttgtttttttgagacggagtctctctctgatgccccggctggagtgcaatggtgcaatctcagctcattgcaacctctgcctcccaggttcaagcgattctcctgcctcagcctcccgagtagctgggattacaggtgcccaccactgcgcccggctaatttttgtatttttagtagagacagggttttgccatgttggccaggctgatttcgaactcctgacctcaggtgatccacccactttggcctcccaaagtgctgggattacaggcgtgagccactgcgcctagcctcttttcacctcttaatagcgtcctttgatgcaaaaaaagtttttacattttgatgaagtcttatttgtcattttccttttattgcttgtacttttggtcaccagccaagaaacgactaccaattctaatgaccataagactttccctcagtattttcttttaagagttttacaggtttaactcttaagattagttctttaaggcattctgacttaatttttgaaaagggtgtaatggaagggcataaattttgtccagcatcattcttttgcatgtggatatccaggtttccagcaccatttgttgatgcaccatctgttgcagtggggctgacacatttgtaagatgcaatgagcacgaatacatgggagcaccatgaatttatttacatgtctttacttcacagttgttttgaggaggctttcactgagaaacctaacagaaatgaatatatatgacttcctataaaatgaaatttaagtaaaattatactttttaaaatgttaagactggagcaagactggaacatcaccagacaaacagaaacataggctgaaatgaagggtttatgtttatcttgctacaaattctgttggcccacaatctcttatgcttattgcataagagagccacagattggggtgatagctcaaataaccagtccctggttttctgcttcagaaacaagtttaaattctctgcttagacaaagtaaagaaaataattgaaagatgttgaatgtgaagttggcatctacaaagtcaaagaagtgagtagtaaatgtaaacatcaggaatccaaggagattctatctttttacacagaaatggcctcactatgcactgctgaagggagaaggtccctccaggagaccttcatgatgaggaaaaacccaatatgatgtaggggttttctgctgcagccctaaattgaattgtccttcgctctaaatacaggtctcacaaagttttatgtcttcaatgatttcacctgggccgagattttgttttgtttttgatgttgtttgttttgagctgctgcctggggcttagaaaagtgacttggatattttgccaaagttgtatttctttgatggaattcgaaatccatgaacactctgctttcctgctgtatccccagagcgggttgagtaccttgcacttcttttcagcacttccctagaagtggtagaagatttggagttagggcctccctcaatctctgccctttctttaattcagaggatcacaaactgttgggggaagagtggtatcttgggcccccagttgatcggatgaatattaatatccaatgtcctgtaatgaagtcatgtgtgcatgtaacatcacttctgcacgcagtgtcatgggaaagtgggttcgcggaccccaggttaaaagcctaagcactaaaggcacagagctagagctctaggaggggcgggatggctggggtggaacgtcatcttgtcctttagtcctggggcattttcactcctcacatggtgggtgctgggcatctggcaggtactgatgtttatggagtcgagggagggtactggccggaactgggaaaaacagggttggggagataattaaggtgaacattattttttctgagtgtaagtcatggcttgaaatctggagagcctgaaggagatcccgctacctaaacccgttttccttttccctcaagcctcatttggccacaggcccagtgtcaacaccagggggcgcccacagaccatgaaggcaccgcgcagctgggattgtttgtggtgggctccaggtccctgacttaaccagggaagccaagaccctgcagccaggtggcctggattcaaccttcagctctggtcctactgacacttttcttcctggtgcctcagtttcttaatctgtgaaatggtgaggacattacagcacttacctctcgggcgggtttctcaacagcagccctattaagaatttggaacagagaatcccttgtggtctgtcctgtgcattgtgggaggtttgccagcagcaccccactcaccccctcccaccaatccccacgtgacaaccgaaaatgtcccaggatttttaggtctcccttgggtctagagctgcatttagtcaagcattttcccacctgacatttgagctcatctctgctttggtccacataaggccactttaaaaagatgttgtttctttaaagattctaaccatcttttaaacaaatctattttcttcctttatttctgcattcagttaatccttccaaacccttggtttagtatatctcaaaatgtatcaactccagttctagtaattaacatatgtgacttgcatgatatctgctatgacccctagtagagttctgattcctttagcacagggaatgtgttctcgattctgctctggatgatgtaaatcaatttattttactttacttgtctgggatgttgctcctcacctgtaaaatgtaaatgtggatatggcttggattactaagtggttttatttcttcattcacctgacatttgttgtgtacctgctgcaagtcaaatacatggcatggtattgtttccttgttcacaccacagcaaatgagaaaatgagacattatagccaggtgtggcggcacaggcttctcgtcctagctactcagaaggctgaggcaggagaattgcttcagcccaggagtttgaggttacagtaaggtctgatatcaccattgcatttcaacctgggcaacagaccctgtctctgaaaaaaaggaaaaagacactgtgagctgtctacatgtactctatgtctcaggagactcatgtgctgtaatttttctaaatggcatctccatgtggtctttcatgaatgtttgtctggtatttcttttctatctttttactttcaacttttctgtaccttctactgaaattatggcttttgtaaatagcctacggttatttatttatttacttatttatttttatccctctgcactatttgtcttgtaattggagtgtctgagtccattacgtttaatgtcattgttgacctcgttgggtttaagtctgtccattttcatttactgccttctaatattatctttcttgctcaactatttttcttctgttgccttctttagatgaataaaaaactttgcattattgtggtcttctcagtaagtgttctagttacaaattctcttattatttctttaattatctgagaaagcacaataatctgtgacttattataaccaacagcagaccataacttccctgactttcacctacctgtgcagacagcacaggggagaatcaatgctctggctctgagacacaggggtggtggaagtaggatagtgattggatgatgaatctgtagctgcagaggcatctgggcccctcaccttcattcctcgtagatgtcacctccactggatgcctgcaatgccctctcctctgtatgctcctgccagagtctccccatctccactgacagcagctccacccttctgctcactcagtccaatactgtgggtgtccttgattcttctttctcacaccacagataaatccattagcaagtgctgtgaattcatccagaatcccatcacttcccactatttcccctgctcacaccccagtcaaggtaagcgacgtctccatcctggaatactgcactcctttcccaccgttttccccactgcctcactagtcccccacctctcaattctgttctcagcacagcagccagagagaagctttcaaaggataagtcctaccatgtcccactttccaaaactgtcctctaactccccatgtcattcagagcaaaggtcaacatccttcccacaccctccagggcaacctgctctgggcacacctctgacttcatttcagtttctctctgttcaacacttctggcctcttcctccttccaggaacacagacaatttcctgccctagtgcatctgcactgaaggtttccctgcctgaaaagaactttctgagacatccgtgtagacaactcctcacatccctcaaatctttactccaaggtcacatttgcaacaaggcccatgctgaccacccagcacaacagccacctccctgtacccacagcccaccctctcgatcacctgccacacagcacttgccaccttctaactcaagcattttctgttcctactctgcttatactatatcatctgcctgcagaggtgtccaatcttttggcttccctgggtcacataggaagaagaattgtcttgagccacacaaaaaatacactaatgacagctgatgagcagaaaaaaatagaaaaaagaaaaaaaaatgcatggataattttcatgatatctgccactacagataagcaaaaaaatcatcacattctaaagctgtcctgggccacatgcatcccgagatctgcaggttggacaagcttgcatctagaatgtatacacgacaaggccagaaatttttctgtttttactttaacgatgttttctaaatgcaaaaacagtcaaatacctagcagacaacaaatgccacttgaatggatgattactgtagtgcgcccccctattctaaaggcaatatctttattaatgtagactcaggccaaatgtcattttgtagccgctgtggaacaatattatctcatgtggatataaatgcaccagtgcttttctcaccagggctgcttttgtgtcctccctccctccctcctcccacaccaatcctcctgcacactgcagcacacaaccatatttgtctcttcaggaaagataacccaaggcttatggctccaattatccaaccacatatgaatctaaattagactctgctttacaaatccatgagtttggtttggagccagcaataggattactacaactcagggcaggaagaagagtaggagagagagcagaagaggagttccaacagaaagtaaactacaatgaaaaactctgggacctctcctctcgggaagtttcagaatctgcttcctttaagaaggttggggaagccaggcatggtggcttacacctgtaatcccagcactttgggaggcagaggcgggcagatcacaaggtcaggagatcaagaccatcctggctaacatggtgaaatcccgtctttactaaaaatacaaaaaattagctgggtatcgtggcatgtgcctgtactcccagttactagggaggctaagacaggaggattgcttgaacccgggaggtggaggttgcaatgagtcgagattgcaccactgcactccagcctgagtgagactccatctcaaaaaaaaaaaaaaaaaaaaaaaaaaaaagatggaaaatacaattgaaagagacctggaaggaggggaagaggtgtaggggtctgaaaatttttcttctgataacacaggaacttctaagtgtagggaccaccctaggtgatatccaagtctatgtgatcacaggtcctggtgggacaaggttctactgaagggccaaggacaatggagcagcaaagatgacccagctgagcagtgaccacataaagttcatggtggcctgagcacccactgggcgcagccccatctactctcctctcctgcaacaaatcagcacaagaaacacgtgtactgtggaaagttctcatgtcttccatttattttgtctctcaaatttcaggaatcttctcctttaattaacccatcaatctctcttggaaataatttgaaaaactaaatttatactcagattctaattttaatacagaagtaagttatagctcagtgcaccacaaatttgagacagagacggagacatcccagccccttttctggaacaggaaaggtgattggggaaggaatgcagttcagcatgaggaagagggtcatggtgggcacaggggtgggctggtctctgcagaaagagaagtcagggttcttgaagtcacaaagggaaggcatgaacaaatcttgccactcagtcccacacagggcagctgtttcacactacagaaaaatattcatgaacaaattcatatcagtcacagtgaggggtgacactttaaacagcccatcacatgctcaatacattcaagtcaaagaaacctcatagcacagctatgtccactgtttccctcaacaacccacacacatcaggccccccggggtgtcacatttacaagccgtgagagacacattagagccctgggcactgtcactgcctagagtagaacaaaaacagcacctggtcagagaccacaggagatgtggccagaggaggaattgtggggtgggtgagctcccccatgggctcccaaacacaagatcccaaggatctcagggatcagcctccttcatacttacttgcagcctgagagtagctccctccttttcaatctgtgggaagaaaacgtcctgtgagaggccagaaaggtggcagggccatgaggtcctagaggaacctcctagtcttggaccctcgagaagtttccagaaatgtgtgactgcagactcagggcgggatcaggaaaaacaaggaaagcagatgtgggtcctcgaccaactgccctcctaaggtctgtccttagccagggaccttcccctgacctgtgattactaggatcaggtccccatcactacaatcatcaaggtgataaatctgtccttcattgtcacaggtgctttacaaaagagaaggtgctggcacacagggcccaggctgggtaggcccatgagtgtggatggtgcttcccagtaaccaggcagggcgcacttctacctggggcttgaaacccccagtgggacaagaaaactcagaccccacttgtcaccccttccttacctgagctcttcttcctccacagcacagcagcgaccgcagctccagtgactacagctgcaaggacaaccagaccagcaacgatacccatgatggggatggtgggcagggaagactgctctgggaaaggaggtgaaggtgagggtctctgacccccaggcctcaccaccgaccctgttaaaggtcttcagagaggctcctgctttccctaacagacatgatgcctccatctccctccttactccatctcagcatgaggggctccggcagcccctcatgctgcacatggcacgtgtatctctgctcctctccagaaggcaccaccacagctgcccacttctggaaggttccatcccctgcaggcctggtctccacgagctccacgtcctgggtctggtcctccccatcccgctgccaggtcagtatgatctccgcagggtagaagcccagggcccagcacctcagggtggcctcatagtcaaagacagggtggtgggtcacgtgtgtcttgggggggtctgaaaggaagagtcagaaaactcaagcactttgcatctctcatgggacactccagcagcacctggatgtgaccatcctaagaatgaaccagatacctggggtggggaagggagcacagaacccagacaccagcctggacacgggcacctgggataatctcctattccttggaaagttctagtctctgagcgggggagcagggacctctggttctgacctgagtggaggccaagggactcagaggagctggagtcagactcccacacacattgagtgtgaggcagagaacaaggcctgaggggaaaagtcctggtgccaaggctgctgtggggtcaaagggaacccctgatcagtcctccagggattgtcttcccctccactccctcagagacttcatcccttaattgtcccagagagcaggacgggccctcagaatcactctctggtacaggatctggaaacccaggaggattcctctccctcaggaccagagggagggcgatattctggtgttggtcccattttcctcctctccttgtgctaggccaggctgggaggtctacaggagatcagggaggcgccccactgcccctggtacccgcgcgctgcagcatctccttcccgttctccaggtatctgtggagccactccacgcacgtgccctccaggtaggctctcctttgttcagccacattggccgcctcacacttgcgcttggagatctgagccgcagtgtccgctgcggtccaggagcgcaggtcctcgttcagggcgaggtaatccttgccatcgtaggcatactgttcatacccgcggaggaggcgtccgtcggaccccaggtcgcagccaatcatccactggagggtatgagaacctggccccaccccttcggtcagccccgcccaccgagcctcgccctcgcccggacccacccgcagggattttggtaaaggcgcctggggttctcccaggtagagggtctgggcgggtcccgcggcctcggggtggatcccagacccggagactcgggagtacccggggcgtccgtggggcatggaggtggggggtcgtgatctgcgccctgggccggggttactcactggcctcgctctggttgtagtagccgcgcagggtctgcaggttcattctgtcagtctgtgcgtgggccttggtgttccgtgtctcctcttcccaatactctggcccctcctgctccacccacggcgcccgcggctccatcctcggacacgccgagtcgctgtcgaaccgcacgaactgcgtgtcgtccacgtagcccatggcgatgaagcggggctccccgcggccgggccgggacacggcggcgctgaaatacctcatggagtgggagcctgggggcgaggagaggttgagacccgcccgaccctcctcccggcgcggctgccgggtcctgcgcccccgccgggccggcccctccctcctccgcgcaggggccgtttccctcctgaccccgcactcacccgcccaggtctcggtcagggtcagggcccccgagagtagcaggaagagggttcggggtgccatgaccaccatccttggcgtctggggagaatgagtccgggtgggtgagcgaggactttagaaccaggaccgcggcgacgctgattggcttctctaaaaacctgtcacctaatgggagtgagaactggggccgcccggtgagtatccaggaagaaggacccgacacaggttaggagaaggaggagagaatccccaacgcggggcctccccaatccatacaccgcctgtggggcctgagaccctgagagccacgcttgaggccctgggacttcgccctgaccccgctactcttgtgccaagcgttctgtctcagtgtctccctgagtcttggcccaggagctgtctgagaaaccagggagaaaccctcggcaaggtccctgtccctctcccttcacttttcatcccggaatccctgtccctgaactggactccctgcctcccactccttgcctgtcctcctgtactcttctagaagaaaaatcaccccacggagcttggtgccagagagtgagctcgccctgggattgtaggtgtaaagacagggttttttttcccccttaaatctggaaaagttgtgcctgagtgcatgagatagaatagagaccagtttgctttttgtttattaactatagtgggtagcataatcttggtaacccctgaatgatcaggaatctaataggtaaaaaatgtgactttggcccgttggtatataaatgcatctaaaagccttacaacaggactcacaaagctcttaagtttcactttcccagacaatgtatctgtgactcccgcttgttttattttaaatttaccttcattccgtagccctaagtttccgtgtgagtccaggacatctcctcaagacaaagtaccacactatgttactatatgttgcaaccaggagccagcacaaactttattcacctcacagttgtaagtgttcagtgcagtcacaatgcccctcactagtgctcatgcactgcctgtttttaggaagtatccacatgtgagtggagtgtatattttttaggaatacttagtattttttaaacctgattaacataaaaaacaattagtttctaggcagacccacataagatattaaaggccaactgcaaagaacacccagcgaggctctgtagatggatgtaataaaatctataaaacaatgtgtttaaacctaagagttccgctgctttggaattctttcctctgctccttttcctcacctcctgctcctccagcccttccctccgtccctctcatccctcaggccctcttctccccttaatccccaccaccctctcactcctgaattgtggctctagcactgttccatgacctgctacatgagtgttctctctatagtggtcctgctactatgagtcagagtgtgtcatttctccacctaaaacactccagtggctccacctcattcttgtgaagcttctagaatgtcaggcacttgagcatatgagggcatacctggttcattgtagggactaaattattttttcttggctgaatgaatgaattatgagtgtattaaattgcatcacagaaaattataaaatgtaaaacactgaaaaagttaaaaaagattttattttatgtaactagtgtgcgtatcaattcatcagttcattccaggagtcttttgagtctgtgtatgaattttataagactgggtaacaaattgtcacaaacattggctttaaacagcacccatttattgtattcattgatttatttttagatacagagtctccctctgtcatccaggatgaagtgcagtcacatgatcatggctcactgcagcctcaaattcctgggctcaagggaccctcctacctcagtcttcagagtagctaggactgcaggcaagtgccaccatgcccagctaattaaagagaaatgtagagacgagtgtctcactatattatcctagctggtctcaaagtcctggctgcaagtgttcctcctgtgtcagctcctcaaatgttaggatacaggtgtgcactaccacgcctggccaaataacacccatttgttgtttatagtttcttaatcagaaatctgggcatgatgtggatggaatctctgttccggtcttcctaaacctgtgttttcattttgaatcctccttcaggcttatacagaggtggcagaatgcagtttctggcagttgtaagactgaggtccctgttcctcactggctgtcactgtagagaacagggagggctgcacttaatgcatggtgcccaccagcgttctttcctacacagccccttcattttcaaagcccacagtggaggaaacccctcatgctgaatccctctcacactgtgaatctctatgctcaggaagaacccagtcctttcaaggactctccttattaggacagtccaagcaggataaactcagcctaaagtcaactaattgaggcccttaattatatctgctaaatcccttcacagcagcacctacattagagttggttgaataactgggggaaggtgaatgaccaggagctggttgttgggagccatgatagaatcagcccaggaagggctggatcttccttttgtgtttaatttggacacagttggaaactgaagttcaagtaaagtgatcattatgaatagtaataaaatacatcctcttcagccgtggaacttctcctttccttttaaaactaagttacatgtttaatatcttatagttaatttagaccaggtgtggtggctcacgcctgcaatcctagcactgttgaaggcagaggaaggcagatttgactccagaagttcaagatcagcctgggcaacatggtgaaacccccatctctacaaaaaaattagaaaattagccaggcatgttaattcatgcctatagtcccagctactcaagaggctgagatcagaggatcccttgagcccaggaggtcgacactgcagtgcatggtgatcatgccactgcactccagcctgggtgacagagcaagaccctgtctcaaaaatagtaatatgatgatgataaatttagagcaaatgcaaattaatgtgtaataatacatcctctcttgtgaaaatgtattagttatttactattgtgtaacaaattatgtaaaacttagcagctcaaaacagcaaatattcatcatctcccacagtttctaatggtcaggaatccaggagcggttttcctgagtgcttctggctcagggcctctcacaaggttgcagtccagttgtcagcctagggctgcatcgtctgagggcttcactggggctgaggattcacatgaaacatggcttagtcacatggctgttggaaaagcctagttccttgctgtctggtcccaggggacctcagttcttagccacatggaccttcctgcagggctgcttatggcacagcagctgggtccccaagagctcatgatcccagagacagagagagagaaggtggaagccatagtgagtttcacattctacacccagagtcacaaactgttatgtcagcattactctatcagttagaagttgtattagtctgttctcacactgctataaagaaatacctgagactgggtaatttataaaggcaagaggtttagttgactcgcaattgtgcatggctgaggaggctgccccaggaaacttacaatcatggcagaaggggaagcaaacgtgtcattcttcacatggtggcaggagagaaaaatgcagagtgaagtggggaaaatccccttatatggtacatatacaccatggatattatgcagccataaaaaggaatgagatcaagtcctttgcagggatatggatgaagctggaagccattatcctcagcaagctaacacaggaacaggaaaccaaacaccacatgttctcacttataactgggagctgagcaatgagaacacatggacacagggagaggaacatcacacactggagcctattatgggagggcagtgctgaggggagcattaggaaaaataggttcaaccgctgacttccacagcttgggggaatcatccccatgattcgatcacctcccatgaagtcccgccgccaatatgtggggatcagaattcgcatgacaattcaaaatgagatttgggtgggaacacagagataggccatatcagaagtgcatcattaagtccaagccacacttaagagagggaattaagctgcacctctgaaagagagctgtactaaaggacttacgtatatgttaaaagcaaaattaaaactattgtttcaggattttgtaaatcaaagacttcttttatctaattatttttctttaatgctttaagcttatcttttaatttaatttaatttaatttaattttaagttccagggtacatgtgcaggatgtgcaggtttgttacataggtaatcatgtgccatggtggttggctgtacctatcaacccatcacctaggtgttaaccctggcattcattagctatttttcctaatgatccccccatcactgccctccccgaacaggccccattgtgtgtttttcctctccctggttccatgtattctcattgctcagttcccaattataagtgagaacatgcggtgtttggttttctgttcctgtgtgagtttgctgaggataatggcttccagcttcattcgtatctctgcaaaggacttgatctcattcctttttatggttgcataatattccgtggtgtatatgtaccatattttctttatccagttcctcactggtgggcatttgggttgattccatgtctttgctattgtgaatagtgctgcaatgaacatacacatgcatatacctttataatagaatgatttatattcctttgggtatataacctttaatgggattgctgggtcaaatggtatttctggttctaaatctttgaggaattgccacactgtcttccacaatggttgaaccaatttacatttccaccaacagtgtaaaagccttcctatttctctgcaaccttgccagcatctgttgtttcttgacttttaataattgccattctgactggcatgagatggtatctcattgtagtattgatttgcatttttctaatgatcagtgatgtttagctttttttcttatgtttattggccacatgtatgtcttcttttgagaagtgtctgtttaggtcctttgtccactttttaatgaagctttttttttggtgtaaatttgcttaagttctttgtagcttctgaatatgagacctttgtcaggtggacagactgcaaaaattttctcccattctgggagaaatgtctgttcactctgataatagtttctttcactctacagaagctcttttgtttaattagatcccatttgtcaatttttgcttttgtggcagttgcttttggcattttcatcataaaatctttgcccatccctatgtcctgattggtattgcctagattttcttccagggtttttatagttttgggatttacatttaagtctttaatccatcttaagttaatttttgggcaaggtgtaaggaaggagtccagtttcaattttctgcagattgctagccagttctcccagcaccatttgttaaatagggaatcctttgcccattgcttatttttgtcaggctcattgaagatcacagggttttagatgtgtggtcttatttctgagttctctattctgttccattggtctatgtgcctgtttttgtaccagtaccttgctgtttcagttactgtagccttgtagtatagttttaagtcaggtagcctcatgcctccagctttgttctttttgcttaggattcttctggctataggagctcttttttggatccatatgaattttaaaatagtttttttctaattctatgataagcttcactttttaaattaatgactaaaagtttgagacatcacagagccttaggtgttgaggggaaaacagtttgaggcagagaaaggagatacaacagtatctctgagtttttcttgccaatatctttaataacagcaatgttctcttcaatgagttaacacagttgagaacatagaataactagatcaaatagttccaagactttagtgctataaaaataatgccttgaaaataagtctttgttttgtctaaaatgtctcaaatttaggggaagtatgcccctagtgccagttttcttattgaaatatcgtcttccaaaaaacatttgcctacacttaaaaaaagaagtactgctctgtctctggagtagccatcctttgtttctttctctaattaacttgctttcacttagaaaaatattgcttaatcagattgcttttcatttacaaagatgtgaatctcatacttcagtcaacacatctagcatgccaataacttcggtttgatgcagtatcacgaaattgttagctcgaattgagaaactagttttttcgataactggctattcgatcggcattctataatacacttaacatcttttgttgtgatattgaatgatatgtgatagaagtgatttggacaccactatgattctaaatagcatgccatcaggtgcttctgaagtggttttgtttgtttctttgttttcgcagtcctattgtgttttctattcatattgctattccatcactggttattcctttctactcttttcttgtttcatttattttgatcaatgatgtgcatttccaattctgtaaaagtttaattcagtggtatgtgtggtagaatgtaacatcaaatcctttgcaagatggaattaccttgcacatcagattgaagattgtatacatgaaaatctacagagatgccagtgagccaaggatcaaatgacctatttgtagccaaagccattttcatggcctcgtggtcctctctgtcacatggctccttacaattctgtgtggttttgttccaatgtaagtagttctcgttaaggatgcttgcaatgaactttggtattcttttctctttcatttttataaaaaccaagcatattttactttgaaaaaatctatttaaggaattaggaatttaagtcaattctttcaactcaatgttttcagaacacatcatcaacatcaagtattacacatttattttaaaagttccattttaaaagggaatggatgatatgttgtttggactttagccagcactgttgtaaaacacagaacctgtaaactaccctgggctgctgcccattcacatcccccaaaaggagactccaccctgagtcttgtgattattattcctttatttagatgtgtggtcttatttctgagttctctgttctgttccattggtctatgtgcctgtttttgtaccagtaccttgctgttttcataatatctataaagaaattatagagtttctttaaggatttgtgtaataagtatagatatatccccaatccaaatattagttagttttgatggtttttaagcttccagtaccgcaaattcctactgcatttattttcccatgatgcacattacatataggagttattctgtggtgtgggaggctgtcattcattcgtttttactgctgaaggtttacattttatggttataccataattgcactagttttctattgatatatatgtagctgattccagttcttgccataaacattagtgtgcatgtctcctgggcacataggcaagaaagcccgcagagtgtatgattaggagtgggatgattggatgatatgttgtatggcctttaaccatactagataataataatatgatttccaaagtgattgtgccaacttaaacttatttatttatttatttatttatttatttatttatttatttatttatttttgagacgaagtcttgctctgttgcccaggctgaactgcagtggtgctatcttggctgattgcaacttccacctcccagttcaagcaattctcctgcctcagcctcccgagtagttgggattacaggcatgcaccaccacgcccagctaatttttgtatttttagtagagtcggggtattggaggccgaaagaatgagggtcgtgatcaactcagtataccactggaggctatatgagcaaacagcaaactgttctcatgaaagcaggatgttggcaaactgacaaactgagtttgctgccagaaggaatcactagaagcaagaagcccccgaccccttcttttagaacagatctttttgtctttgtctttatttctgtgttcatcccccttcattatatcccatagtaaccgattgcgacaatggggttttaccatgttagccagactggtcttgaactcctgacctcaggtggtccacccacctcagcctaccaaagtgctgggattacaggcgtgaaccaccacgcctggcctaaacttttgaaataagtgcgtaatacttgatgttgatgatgtgttctgaaaacactgagttgaaggaattgagttgaaagccactgtcttggctgcagaattatagcaggcatttttatttagattctgtcaataactttctgttgtttacttgtttctcatataccgtggcattgtacttttgacatacagattcagaaaatgcttacttatagcacaatcacatagggttattttatatgttaggaaattttcataataaaaaggaaaaaatggaggaagggagggaaagaaggaggaagagaagaaggagtgaaagaagaaaagaaggaaggggaaggggaagaaaagggaaggaaagcagagtaaaaaggagggaaggcgagaggttgaatggaaatagagaagaaagagagggagggagggacagaaggaaggagaaagggaaggaacaaaaaagaaaagaaactaaaataaagaaaagaatacacgttgagaaactagaaaccctacgtatggccagtgttatgaaaatggaaggaaataaagcagatgtacgtaacctgtatagaataatggaaatgtaagagggcttcattagttatccattgccgcataacaaactacccccaaatttagtgattaaatcaacaaacattgacgaactcaaaaacataatacaaataccagcaaaatggagccaacgcaagtagaagaagttgaataaacaaaaggattttacaaattggaataagaggacactggtgtgcagatgaaaatgattttgtagtccaaatcctccaaaaagcaagtgccatcatgggattaaagttacaacattttattaggggacatacctgtcagacgatattgtgagggagtcaggttaccctgggaaaggcaacaggccgagatgcaagtgtgacccccagtgatggacagaaggagagaaggtttactggatgtttcctagaccacaggcaatctaaggagagttgagcaaggccatggaggagacccggagccaccattggccatcagaggagtcccctgtctcccaggaatgtcctgccttagtgtcactggtgtgagccatcactgactgggaacagcccatgggaagcagggcctccataccaatgctactgaggatgtcagagcacaggagcagggccttgggagattacccaggagtgtgactcaaacctgctgcccagatgggtctgggttcttggaaatcaaatcctctcaagctaaatttctggatgattctgctcacacttacaatggggcaaggggacccagaaggttcccaggtggatgtctggtttccacacacacttctgccctcattgtgtgaaagtagccatgcctcctcctggggatgagggcctattacctgggcctggagagaaggacactcctcttctcacgatgtggtctctgggaacatgctctccaaacttctctggtgactaaaataatgtgtagttcaatgggctctcttttgtctacttttaagggtaccctcctttggaaaccaggacctcctaacccgcacagcccattgttgggacataaaaaaggcaaaataccttagtgggtgaatctaagagattggacatggagccatacctgcttccaccttttgatttctggacccacatgttcttccattgagaacacagcaccatagagacatctctgattcaaacaatataccatgttctgaaagatggcactctcagagtgcttcctccaggctggcactgagttgtgcctatagaagacctgtccagcattccttgtggctggtagctcctgggtggtgcagatggtgataggattagtggaacccacagccatggaaacattaaaactttccaggccaaatgggtccttcaggcagagaatgggctaggagcaccgcctagcctgcagatcaggaatgtcaacagcacccggagagtggtgctggctgagtgtcagagcaagacaggaaaacccacccatggaatatgagcctatttctgtgaagatgaacctctggcccttccaggatggaagtagctaaatgtagtcacttgttacttagtggctggtcgccgaaagaaatagtgccccactagggcacatcatgggctccaaatgctgacgagttgacattcaggagtggcagtagctggatctaccttggtagggctgggagagtcactgctgctggccccatacatagcctcatgcctgccactgtggttgctccattcatgcacccatcctaccaggcctgggctgacccatggtgaaggctggctaactgccatttgtctgtttggttgttcagtgccacatcacacttgggtgttttctgtgggtgtcaacatgggattcaagctcaacccaggtggaccattttcacctgttgatgaatgctgttgggcctgtgcaatttatgactttgtgggtcacacagccacttggaaccacattgttgtttggtgtctcttggtcaagcattctatcaaatcaggacaagtaacactaaatgttgcttctaacagggggcatatgtctctgctgtggatgacatgatcttactccagaatcccaggccctccattgtgactctcccactggtgcttggttcagctccatcctgcatctttccccaccactggcaccaccagccccaaggggtctgagggatgctggctgcttgtaccatggcctggatctgctgcagggtcctttcctgtgtgggccccacatgaaggtggcctcctcctatgtcacctagagtgtgggccaaagcaacacacctaaatgtggaatgtggtgtcatcagaactcaaagaggctcatcaggcagtgtgcttccttccttctggtgaggatgcaagatgaaacagtttgtcttttaccttggaggggacacacctacattcccctaaacacttggcacttgttcacccataaaacttcacttcagtggccactcttgaagctctgtaaggtttaccttcaccttctggagtgtgcttgttttgccaaggactccagtgcactttctacctgctgctcatccaccccagtaaacatgaaattgtcaatgaaatgagctgatttaatatcctataggatatccagtatgtctagtgtagtcttaagactatatactatagcgggcagaggagttacaatagccctgaggcaaatgataaataaatgtgttgtggatcccacatgaatgtgaatcattccatatcccctttctaattggagtggaaaggaatgcactcaccaagtctgcagctgcacactgtgggcccaaggatttattaatctgctctaccagtgatatccagacaacataaaagctgcaattataactcctacttggccatacctagagtaatctcattcattctttaggcctcatcaggctccctcagggacagtttgctggattacgtagagacgatagacagccccaacaccaccccacatccttcagctctctcatggtgatgtgacccccacagtactttcagtgccttccacaagacacatgaggttgcctggttgctgtggtgcccactttccaccccaccctcccgtacccccatgtcactttcattgtgtcctgaataacagtttcaagtttgtctatggcttctgcgaggagccaggacatccagatagaatgggccacatgaatcaattggtatgtgtttctcctttcaggcagagtctcactcacttcacacaagcacagagatccccatataggcaactagattatgagaaacaaacgcacccatccaaacccaaagaatggactctgagacccagagaacagcaaaagtgagagtgtcagtgacggttttgcaatattgggtgtctggaatgcaggcacaccagggagagtttcaacaatttattccctagtgctcaactccctcccccagttgctcattagctgagtaccaaggacttacgatcttcccggatgtcacctattggtagtttaagacttctagtatgttccttagggtttttttttttttttgctgcattttgttgcagcccataatgcattgtgattgtctcaggactctttaaacatttgacttatgtccctaatggctgcacttagttgataagaaagggtacaattatctatgttgcaagttagcctaaactacattttttggtgaggtggggaaggggtcgttgagggggccccaaccgataggtgcctggccagtgcatgaaagggaaagcaagaagtaggggggatggtggcttagtacattttccttctttatctctttatgaccatgtggcctgcttaaacctatactaaggcacatagaattgaaaatgagccatcacatgtaggttattttttacacccttaagtcctgcccaagccagggctgggccaaggccctcgaacatccagctgtagcctcctcctgctgcagtgaaggagtgggcagcagggagggccgtggtgcctgctttgtccccatcccggtctctgtctctcaggcttaccaggttgcatccaggtgggtgagttgggaattgcgtgctgattgctgagggcctggatgatcgctatctcagagggagcaaatagtaaaggcagatgtgatctagggagggctagaaactggagaggaatccaaggagaggtggtgcctctagtcccttcctttctgcatccccctcccctgtttctccagccatcaggaggacatcaagaaaaagacccacgagacccagaatgagggcccccatgtgtacagcccctttgaggtccccttgtaacagggagagtcctgagtgcacatggccatcctctgtccactttgcagctccccatatgcctcatctgggagctgtctcaggggtgtcacgtcctctgggtccctcgagaccgtgctttttctgggttcccaccatatggcccctgtctccctgtgtttccttgcagataatatggaccagttgataagcagatgtccctgggctatttggggagtggggaccagccctctgtcagggcagctgtggtccctgttttcatcccatgtccaggtgttactttttccagcccccgagggtcatagtacccagtgggctgttttttgggctttgttctgtgctctgtggcctcaccttgcctttcctgagccaatttttttgttcttagtgtagtcactgcctggtaagtttaaaataagagacagtcagaatcatgtcccccacagtcaggttgtttgaggggagaggaaaagagcaagcagaaagttttgagtttctgcaaagacagaggcagtgcaggggacagtgagagtctgaggtgtccaggaaacccgagtctttctgccatttctccacttccgtgtgtctggccagtgaggtggtggtgactcatccttgaacctaattgcacagttagttggccactcaggcctgggcagatgggacggttcatcccctgccctgcagcaagagggccccgtccaggaggcaaccacagcgcgggcagtgcaggtctgtggttgctcctgctctcacctgcggtgtctcctatagagggattgtcagttctggttccctgtaggcaggaatggttttctcgtaggtcactgggacattggctagaaaaagggcatgaaaattacatgttagtttctcaaaattcctgctttaagtattggtgtccatcaacataatttcagctggataatcttaataggatttcctccaacactgatgttgtaaaggatgttgaatagaacaggaagtcaaatttggggcttcgtttctcagagggtccatgtgggagacagtgcctgtggcagtggcaatccccaggtgcagagggtgcgtagaggcagcctcaggatgaggggtctgaagaaaccccctactccacaggcgaagaagatcccctgtgagctgcgatggcagtggcctgggtggaatccctgttaggaatgggacaggaagggcttgcagcctcaccaagcagcagccctggggtggagctgcatttccagggttgagtggacaggcaggagcaagcacagcccaaatgcaggttatggggagggcaggctgggcctccttgagcaagggggtccccagcatcaggtcaggtgcagactccatggcagccacatatttccatgccgggcctgtgagccccagggcttcctgatggtatctctagttaggagctgtctgctcagagctgggaggggaggaacagtgagctgctggtggagggcagaacccacagtgtgcagggcctgccctggtatgcaggtgcctctgcaggtgaagagggcctggggtctcaggaagagaaggactgtgtgtgacttggcccagacctggaaggacatggagacagggccagggcctctctttggggaggcctctcactgtgtcagggctggtcaggcttgagaggaggaggaaagggcactgagtttcctcttgggtcttgttccttagtcctgggtcctttcactcactgcacaatggatggtggacacagggcaggtgctgatgttgatggagtcacgggaggggactggcaggggctggaaaagtgccatgggagggagaaaaaagtggggacgtcatcttccgtcagagaaagggtaaatctgatttgggagtgactgaggagggagaactcctcaggaaataaaaagcagcactctgcacccaggggagcatttattggtttctctcttttttccagagcgcgtgagcctgcaaggcctgggtcaacacctggttgggacaggagaccaccagggcagtgcacagctgagatctcagtctctggtgtcagctcctgggttcgctggctccactgagggcaactagactctgcagccaggcggtctggattcaactccttgcctaggcctcaccagcatgttctctctttgtgcctcattttcctcatctatgacatggggaaactacgagcatttatttcttgtggttggatgaatgaaaagggttagtatatatggggtatttgcagctgtgccatattatttttgttattttgttattttattatattttgatatattacatatgcagtaattgtattattataggtgagctttatgagtgagtgtcctgctgatggctccttggtcctggcccagcaccagctttcctggcaccttgaggtcctgtcatctctgtcatgctctcctgcattaccccattctactctgtcttcatattttatactatagatatttaactcttaaatagacatttctggtctgcgttttatttcaagtgtctgggaagggatagtgtgaggttcaggagagaaggagaggtctgtctccatgctttgacacagcataaagaaatctcccctcctcccccacatctccccaccagttctcagtgagggacagattcacagcaacaccgaaagggctgggaagggatggggggacatttgcagccagtgttcaggggctgaccctgtggggcaacatcttccctgcagagttagagcccacatatgatgatgtagagctgaagggtgatatcagggaggggacggagagtgctttgtggtttcctgattacgaagagtagaggtcagtcagcttctggggtgaagtgactgctggggagattggattgaattaatgaagaataagtgagctgggattgaggatgagtaaagcaagcatcagcatctcccgccatcagttcagactgattggggaggtgggatagttcctgaccttgttgtgtggttcctcctaacttcctggtcttggggacacagatgggtggtgctgttcttggtcagggcagcctcagctccatccagataaagcagtggtggcagagagagttaggggagcacctgtgaaacagaccaaggcagggatgggagccttctgtgcagccagagtggatgcaggacctgcctggatgcaagagaaggatgagggaccctagctgggtcctgttccctgactccttgtgttcacagggcaaccagtaagggagctggggtagggaattcattcataagctatctatctagagatgtgtttatagacatattatttcatgtttgtattcaggtttgttgtcacagacacatttatccatgtgtgttttatgtttaagttactttggaatagctcagtcacaaaatcttaatctcttaatttgtgctgcctctctacacggacacacacacacaggcggacacacacacaggcacacacacacattcacacacatgctatacaaacatgtctacctgtatctataaagagacatgttatgttattttattttttatttcttaaattcatatatattcatgaggcacaagtgcaattttgctacattgctatattggttgtggtaaagtcagggccttcagagcatccagcactggagacaagcacattgtacccatcaagaaacccctctattatacaccaactgccaacccccttacccttctgggtctccatggtccatcatttcacactctccttttatgtatataaagagatattaaccaaatacggcagagtggtaacttgaattttactgcaccgttctttcagcttctttgcacatttgaaaatttatacagttataagttggaagaatgagggaaaatagagagcaagacagtgctgaataggaataggctaggggttgtgtcccactaggaaccataattgatctttgccattttgaaagtgtgtcccctgagcagccttcagagagtcctggaggcaggcttgttttcacagtaataccaagatgccatctgcctgtttcattgtgttgacttttccattagtgctgcaaatgccaaggtcggtagcacacccagcacctcagcagaaccaggcagtggctccaaactgcagtcccatttaagagtgtctttgatggagcagtaaaaaatttatgtggattaaagtttgatccttgagtatacgtctttaatattctttgtgagaaaatgggaaatatgcataagacccttactgcacagagaagcaggatggtagccttgagaaagggcacttgtgtgactcagttatgatttcaaccagcagatctcactcacctacggaaagacagttgtattaattcctgtttgggggtatcatgaataaagctgcaagagtatttgtgcacaggattttcgtgaacataaagtattcccttgtttgaaataagtgcctaggagggcaattgctagtcataaggtaaattgcatgttcggtttgaagaaaactgcaatactcatttccagagtggctgtaccattttaaaatacatccctaccagcaatataagagtgtcccagttcctctgcgtccttgccagcatctgttgctacctttattttgtatttcagccattctcatcactgtggttttaatttgtattttcctactggataatgatgttgagcacctattcatctgcttattagcccagtatttatcctcttcagtgaaatgtctgttcatgtcttgctcattgcctgttttgtatttggatttcatttttattgtttttaaaatttcttcatatattctgaatacagtctttacataatatgttgcctgcaaatatcttctctcattctgtagcttgtctttttatgctcttcataggtctctcacagaacaacagtttttagtgttgataagatccaatttattaacttttatggatcatacttttggtgttatgtctaagaactctttgtccagtcttagctctgatgactttttcttaaaaggcttgtaatttaaaaatttaaatttattatttattttagaaaaaaaattcttgcctaggctggccttgaactcctgggctcaagggatcctcccacctcagcttcctgagtagctgagagtacaggcctgtgataccacacctggctcaatgtttgccattttaactctgtgctttacatgaaagcttgtgactcattttgagttatttttgtatgaagcatgaagttttggctcaggttatttttttccactgtggttgtccagttgttccatcaccatttgatgggaaagctctccttccttcattgaattgcttttgtgcttttgtaaaagtcagttgagcatgttttgctcatttttagttgagttgctcatcttcttacattgagtttaagaacttttcacatattctggatacatgttcttcatcacagatgtaatttgtgataaattgtgaaatattttctctcaatctacggcttgtcttctcattttctcaatattgtcttttggagtacttaagttttaaattttaactaagcccaatttgtctctcacttttttttcatctgtagatcatgttttttgtattttatgtaagaatcttttgcctaactactcaatgtcacaaaaattttctcctatattttcttttagaaattttatggttttaacttacaaattttagctgtttaggtctctaatttgtttgagcttatattttatatggcgataagtgtcacatcatattacctatgcaacttcattgaagatcaattgacaaaaaaatgtaagaatgtctttctagattctcacttctgttcattaatctctgtgtctctcgctttcacactgtctggattattgtagttttatatgacattccattttttttcaaatttgcgttggcttttctgcatcctctgcattttcacatacatttttaggattaaattgtcaattttccataaaatgcctgctggggttttgatagagattgtacagaacctatagatctcttggtggagaattgccatcttaacaatattattgagctttccaaccgcatctatccatgaatttagacctttaatttctctcagtaatgttttgtagttttcaacaaacaaactctgctgtcttcctaaatttattcctgtttctctctttttgtaactactgtgataggaaagtttagattttaattgcttgtatagagaaatatgttaataatttttaatttgagtttatatcctatgggagcttctggattcattttttagtgctagcaggcttttatctgcttgtgaattctacagacaaggtcatgttatctgtgaatagagttttatgttttcctttttatctggatgcctttaacttttaattatttgccttattgcaccagctgcaatctccagtacaatgttaaatagaagtgttggattggacatccttgcattgatctccatcttaggagaaaagcattcagtctttcttcagcaagcatgattttagttgtgggttttttatagatgccctttatcagggtgaggaaggtcccctccattcctattttgttgaaacttatgaacatgagtggtgttaacatttttgtcaactgtttcttctgtatcttttgagataattatgtcttttattcccttactacagtgcattccattaattgatttctaattgttaatccagccatatattcctgggatgaatcccattggtcatggaatgtaatccttttttacgtggctttctattgtctgccaatgtttgttaaggatgttttcatttatgtttattggtgacactggtctatggtattcttttcttgtcagtcttgctctgactttgatattagggtaatgtcagttctgtaaatgagctagaaagtcttgcctcctctcttcttgtctgaaagagcttttgaaatatttgatagaattcaccagtgaagatatctgggctttggcatttctttgtgagaaggttttaaaattactgtcttagtgtacagttctcttcagattttctatctatttttgagtcagtttcagcaatttctatctttgtataaatctgtccattttatctaagtggtctaactgattggcttcaggtttttcagagtattaacttataatgatttttaacttctaaagggtcattagtgatactctctcttgtgttcacaattttggtaatttatctcatttctcgtactgtctgttttgacttttggtcaagaaaacagacagaggcagctctgtgacagattctgtagtgggaagctttgatcattcatagctggcaagccagactaatgccagcaaccccaaaggagctgccaatggatcttgacagggaagtcactgactctggattgggctatgttcaaccaggggtagatgtcaatgcttcaagggctatacaagaaccagaaaaatggagattacaccaatttggactgttgagtcacatttctttacacaagaaaacacactttacagccttaaaaagccaacaatgcacagggaaatgtactattcaggggaaactttgatagaatattgaaatggctgaccaggcgcggtggctcatgcctgtaatcccagcactttgggtggccgaggcgggcggatcacctgagtttaggagtttgagactatcctgaccaatatggtgaaaccccgtctctactgaaaatacaaaaattagctgcgtgtggtggtgggcgcctgtattaccagctacttgggaggttgagacagtagaattgcttgaacctgggaggcagaggttgcatgagccgagatcatactactgcactccagcctgggcgacagagtgagactccatctcaaaaaaaaaaaaaaaaagaaatagtcagttgaaacattggttgtctaattgtctaaaaactgccaatataattgttgggcaatataaacatgaaggactggcttttatatcttcatgaatgtgcttactgtcaacatgggtggagctgcgaaactgactccactaggtagcttcctctctttttcctgatggatcagggtgatgctgttatgactgtacatacaattcttcttaaggggaggatgctggaataatgactacacttcatttcttatttctttttttacacagggtgcagtggtaccaggaacagggatgcaaatcgaactgccagaaacaggaattatccctaaggaaaaaaccataactatatttttatacctttatgtaagaattcccaagcaaatcaaggattgcgctgtgccttcatttcatctggcaaagtcgggattaactgtaagtagagctacgtagactggtggtcagatagcctgcactagttcctaacctatgtaacctaccgtctatgatcaagagtagattaagagaagacatggtagaatactgttgctgcatgcagtctaggccagcacagcagccaaacctaatgtcacttctagaactggaaaagactgatataaagggacagaaggaggaatagtggctgagggtaggtgaataaatcaaagggttatgtaatgaggaaaattcaatattagcttatctcctcaaaagtggtgtgagcaagagatgttgtctcttaggtcaactatactggatgcctaaaagggtgaagctgtgtgtccctgagaccattcttgtttttggaacctgttaagattgagtggtgtctgcaaagctgagtgatgtcattctgggagacatattcatacaagaggatgataaactggcctaattttgaatgaccgaatgagacttggataatatgccaatgcttctttactgttataatccttttcgtatgaaaaatatgtggtcaaagaaaaggggataatatgagttatcacaaaaacatttagtcttgtccctggtttctcctaaaaaccttagaatctcttgagtgattagagtgtctttagaatactgaggaaaggactcttggctgagtggatcctggataccttgagaatgggggctggctgccacagacacatacctatgatgagagggttgtcttattccgttttgtgttgctataaagaaatgtctgagactgactaatttatataaacaaggttcatttggctcaggattctgatgtctggaaatgtttgagcatttagcgagggcctcaggctgcttccactcatggcagaaggcaaaggggagctggtatgtgcagaagtcacgtggtaagagaggaacagagggagtaggaaggtgcgagactcttttaacaactagctcttttggaaactaatagggcaacaattcattgactcccgagagagggcagtatctctctgttcataaaagattggcccccaagacccaaacgccacccattaggccctaagtccaacattggggatcagattttaacatgaggtatctggggataaatatttatatcattgcatcctgtccctagccagccaaagctcacattcttctcacattgcaaaagacaataatcttctcccaattgtccaaaatgtgttgggttgatccagcatcaactctaaattccaaagtctcatctgagactcaaggtaagttcttatagctgtgcacctgtaaaattaaaaaaagttatttacttctaaaatattaatacaacagtggtagagacatttcctatacatttccattccaaaagaaataaatgggccaaaagaaatgaatgcagtgtcctcacaaggttgaaactcatcatggcagacattaaaacttaaagctctaaaataatctcctttgactctatatcttgaaccctgagcacactggctgctgcaagcaatggactcacaatgccatcttcagcctcatatccgtggctttggtgaacataatccatatagctgctctcatgggtgaacattgaatgcttatggcttttccaggctgagcttgcatattgccagtggctctatgatttagtagttttggcaggggtcctgttcctgcagctccactaggaattgtcctggatattaaatttcccctttaaatatcagttccagtttcaggtcatgtctttgctcacacatatgtgcataggctattacaagcaggcaggccaaatctggaatgctatgctgcttagaaatttcttccaccagatacccttatacatcactctcaagttcaaagttctacagatccctagggagggggaacaatgcctccaagttctttgccaatgcataacaaaagtgacctttcctctaggtcccaataagttcctcatctccatgtgagaccttatcagcctggactccattgtccatatcactatcagcattttggtcacaacagcttaacaaatctctaggaagttgcaaattttcccccattttcttgtcttctgaactctccaaactcttccaacctctgcctgttacccagttccaaagccgtttccacattttcaacaatttttatagtaatacccaactcccggtaccgattttctgaattagttcattctcacacttttataaagaaatacctgagactgggtaatttataaacaaaataggtttctttctttctcctcccaccatccaagatgccaaaaggaaagaaggccaaggagaagaaggtggctccagcccctgctgtcgtgaagaagcaggaggccaagaaagtggtaaatcccttgtttgagaaaaggcctaagaatcttggcactggacaggatatccagcccaaaagagacctcacccactttgtgaaatggccctgctatatcaggttgcagcagcagagaaccatcctctataagtggctgaaagtgcctcctgagattaaccagttcacccaggcaccagacagccaaacagctactctgctgcttaagctggcccacaatacagaccagagacaaaccaagagaagaagcagaggctgttggcctgggccaagaagaaagctgctggcaaaggggacattccccactaagagtccacctgtccttcgagcaggagttaacaccatcaccaccttggtggagaacaagaaagctcagctggtggtgattgcacatgatgtagatcccatcaagctggttgtcttcttgcctgtcctgtgtcataaaatggggtcccttactgcattatcaaagggaaggcaagactgggacatctagtccataggaagacctgcaccactgtcaccttcacacaggttaactcggaagacaaaggtgctttggctaagctggtggaagttctcaggaccaattacaatgacagatatgatgagatccgccgtcactggggagacagtgtcctgggtctcaagtatgtggtttgcattgccaagctcaaaaaggcaaagggtaaagaacatgccactaaattgggtgaaatgtatgctgttgagttttctgtatgtaaaaataattaaaataatataaattttccttcaaaaaacaaaaacaaaacaaaaacagaaaagaggtttaaattgggtcatggttctgcaggctatacagaaagtatgattctggcatctgctcatcttatgagagggcctcagggaactttcgattatgctggaaggctaaggggaagcagacattacttacatgcctggagcaggagggagagagagcagggaggtgacacagatttttaaacaccagatcttatgagaattatcacaagaatagcaccaaagagatggttctaaaccgttcatgaaggatccatcctcatgagccgatcacctgccaccagacaccacctccaaaattagggattacaattgaacatgagatttgtgtggggacacagatccaaacaatatcaggggtcatggtggacatgaggatgggctggtctcccatttcttacctgttactgtagacatagacacattcagatgctttggcagaaagagaagccagaggcccttaatgtcacaaagaggaggcatgaacaaatcttgcatctcagtccctcacaaggcaatcttagaaaaaacatagtcataaactaatccaggtcagtcacagtaagttgtgacactgaacagcccaccacaccttgaaaaattccaaatcaaagaatctccagagcttagttgtgtcccctctgcccaactcctctttcacttcaggccctctaaggtgtcacttttacaagccgtgagagacacatcagagccctgggtactgttcctgtttggggtggaacaaaaacaaaatctggtcagagcccacaggtgatgtgactaaaggaggaattttggggtggctgagctcccccatgggctcctgtctacactatcccaaggatctcagggatcactcttcccacccctaccacacttacatgaagcctgagcataactgcctccttttccatctgtggaaagaaaacaaactgtgagaggccagggaggaggcagggcatgagatcctagagaagtttccagaactgtgactacagacccaggtcaggatcagaaaacccaagggaagaggatgtgttgaggctggaccagttgtcctcctgaggtctgtcctcagcagggaccttcccctgacctgtgactgctgggagtcaggttcccatgaccacaatcaaggtgataaatttgtccttcattttcacaggtgctttacaaaagagtaagtgttgatagacagggcctctgaacagggtaaatgtgtgtggagatggtgcctcacaactaggcaagatatgagccaactcctacctggggcttgaaatccaccaatggaagaaggaaactcagagctcacccctttcctacctgggatcttattcctccacatcacagcagcgaccacagctacagtgaatacagcaacgagaagaaccaggccagcaatgatgcccacaacggggatgatgggctgggaagacagctctaagaaaggaggtgaacgtgaggggccctgacccccaggcctcagccctgaccctgcttaaaggctccagaaggacttctgctttgcctgagaagagacatgacctctcattcgtctccttaccccatcttagtgtgaggggctcaggcaacccctcatgctgcacatggcatgtgtacctctgcttctctccagaagacaccactgcagctgcccacttctggaaggttctgtaccctgcaagtctggtctccacaaactctgcatcctgaatttggtcctccccatcccgctcctgggtcagtgtgatctccagagggtagaagcccagggcccagcacctcagcgtggcctcatagttggagatggggtggtgggttacctgtgccttcaggggatctgagggcaagaggtagaaaattcaggcactttgcattcctcatgagacacagcacccatgtgaccatcctgagaatggacgggacacctggggtggggaagggagcacagaacccagacagcattctggacacaggcacctgggataatctcttattccttggaaagttctagtgtctgaggcggaaacagagatttctggtcctgacctgagtggaggccgagggactcagaagagctggaatcagacccccacacgcattgagtatgaggcagagaacaaggcctgagaggaaaattcctggtgcccaaggctgctggggggtcaaaggggaccgcgtatcagtattccagggattgtcttcccctcctttcccgcagagacttcatccgttaattgtcccagagtgcagggcgggccctcagtcactctctggtataggatttagaaacccaggaggactcttctgcctcaggacaagagggagagggatattttagcgttggtcccattttcctcccttcttttggaaggtggctcagggatatctgcaggagatcagggaagcgccccgtggcctctggtacctgcgcattgcagactctcctcattcttaaggcctttgctgagccactccgcccaccttccgggcaggtaggttttgagcagctctgcatgttcctcctccaaaacatctgagccgccttgtccgctgcggtccaagagagcagtgcctggtttaggacgaggtaactggcgccatcgtagggtatgttcatccccgcgcgaagaggctccggtccgggtccaggtcgcagctgtgtatccactggaggtgggagaccctgtccccaagcccgcggtcagcctcagccactgagcctcagccactgagctcctcctctgccccgatcaatcccccggggatttgggcctgaactgaaaatggaatcgggtataggcacctggggttcttgtgtcgagggtctccacgagtctcgcagcctcggggtgggtctccgattgtgctacagtgggtagcacaatcttggtagcccctgaatggtcacgaatctaatttgtaaaagagatgatttttggccccactatatataaatatgtctaaacgcattgcaattagactcacaaagtgaagttttactttcctagactgtgtatctgtgactctggtctgttgtatttttacagtatctttatttcatagctctgagtttgtgtgtgcgagtccaggacatctcaatacaaagcacaatgtattaccgtatattgcaaccaggagcctgtacagaatttaattacctcagaattgcaagtgcttaatgcagccaaagtgcccttcgccagtgctcatgcactccctttattattaatttttttattttttatttatttacagacagggcgtcactctgttaccctggctaaagtgcagtggcacgctcatgactcactgaagcctctacctccttggctcatgtgatcaatgctcctccctcagcctcccaagtagctggcaccacaggcttgtgccaccactcctggctaatttttctaaaaataatatttgtagagatgaggtctccctaaattgctctggctggtcttgaactcctgggctcaagcaatcctcccgcctcaacctcccaaaatgctggtattacaggcatgagctataatggccggcccatgcacttgcctattattatgaattattcacatctaagctatgtgtatattttattgagacatttggtattcttttttaaccttttttttttttttgagacggagtctcgctctgtcgcccaggctggagtggtgcaatctcgctcactgcaagcatcgcctcccgggttcacgccgttctcctgcctcagcctcccaagtagctgggactacaggcgaccgccaccacgcccggctaattttttttgtaattttttattagagacggggtttcaccatgttggccaggatggtctcgatctcctgaccttgtgatccacgcgcctcggcctcccaaagtgctgggattacaggcgtgagccaccgtgcccggccttttttaacctttttatcttagagaggcaattaggttttagacagccccacagaatgcattaaagaccaaggtgcaagtaacactgtgccaggctttgcggataaatgcattaaaaatctataaaacactgtatttaagtctgagaattccattgctttagaattctttctgttcctttacctcacctcctgcttctccagcccttctctctgttcctgtcatccttcaggccctcctctccccttagtctctactactctgtcactactgaattgtggccctagctctgtccctggccctagctctgtcccttgcctgctgcccatgactgttctccccacaaaggtcagcaatcctgctaatgtgagtcagattgtttcatttcttcacttaaaagcctctaatggctccatcttactctcaagaagcctctagaatggaaggcacaagcacaggggctttgggttgttttgatcaaagttgtatctacagaatataaaagtatatctgccacatagtaggcactaagttaatttttgttgaatgaatgaatgaaatataattgtgttcaaaattgtatcacacaaaaatcatgaaatggaaaatgcaaagcaagttaggaaatatttggttttatgcaactactatgcatatcagttcatgaattcattccggtggagaaaatgtcatatacttatcctttgaatctgtttatttatttcctggcagtacataaccaattaccacaaacttagtggctgaaaacagcacccatttatttgtctacatttccttcatcagaaatccaggcctaacgtgatagactctttgttcagagtttcgcaaagttgtatcctcatcttaagattggggttctcccccaagcttgtgtagagtttgttggcagaattcggtttctggcaattgtaggattaaggtccctgtttccttcgggctatcagagtagacagtggggagggcttctaattcctattggccaccagtgttctttccccatgatccctccattttcaaagcccaaagtggaggaagcccctcacgctgaatccctctcacactgtgagtctctattctcaggaagaacccaatccttttcagagcttacctgattaggaccgtctaagcaggataatcctcatcttaaagtcaactgactggggactttaaatatatctgcaaaacctcttcacagcagcacctgctttagtgtcaactgagtaactggggtaacctgagtaaccaagggtggttattggggtgtcatcatagaatcagcctagcatagcctggatcttcctttcatgtttaaatagaacatacaagttgaagatcaaaaaatagatcattgttaatgataataaaatatatcttatatagccatggaaatttttattaaatattaaaagcaaatgacatgtttaatatcttataatgaatttagagcaaatgaaaaagttcagtgattcatcctctcttgtgaagctgtattagttatctactgctgcataacaagtcacctacaacttagcagctcaaatcaacaaatatttatcatctcccacagttatccatggtcaggaatccaggagaagtttctctgaatgcttctggctcagggcctctcacaatgttgcagtctagttgtcttccagggctgaatcacctgagggctcaaatggggccagggattcacaagacacaagaatctctcacatggcttttggaagaggctttagcttcttattgtctggtcccaggaggactcacttcctagtcacatggaccacaggcctccttatgacacaacagccagcttcccccagggctcatgattccagagaaagaaagaaccaaagtagaaacttcggtgagtcttatgttctacacccagaatcacaaactattaagtcagcattactctatcagttagaagtgagtcattaagtccaggctacacgaacagggagggaatgaagctgcacttctggaaaggaggagtatcaaagaatttataaacatgttaaaagcaaaattaacattattgtttcagggttttgtaaatcaaatacttcttgtatctgactttttttaatactttaaaattctcttctgtaaagttgattaaatatttgagacagagaaagaagatacaacaatatctcagattttttttgtaaatgcctttaatattaatgttctctttgataagttgcaacagagttgagaaaatacagtagctaaattaaagtgtcccaagactttggtgccatacaataatgcctttacaatcgtaactatgtttgtttctcttcagaagtttctaattcggtttaagaatgcccaaaatgccaattttcttactcaagcatctacaaaaatatttgcctaatcagggtgctttgcagctagaaaaatgtgaatctcacacctctgtctatacactagcttagcatcatgacaataatttgtttggctagggtaggcagaaattgtttactccaatctaggaacaagatttttcaataactggctattcagtgggcatcctatgaaagtttaacatctttcactgtgtttttaaattagatgtagtagaagtgatttggactccagtatgattctgaaaaacactgttcttttgtgctgctatcattgctgtacaagcatctctttcatgttttccattcttattgctatttcatcactagttattcctttatgtcttttcatttaatttattttgctcaacaatgcttttttttttactgtgtaaaagtttaatccacttgtatgtgtggtaaaatgtgagcaacatatcaaattctcaaattctttgcaagatacaattgccttgcacatcagattgaacactgtatgccagacaatgtagagagttgccaattagcccagggtcaaatgacctctttctagccaaggctatttttcatgagattctggtcctctctgtcacatgactctttacaattggctgtggctttgttttaacgtgtgtagttattgctaaggatccttgagatgaactttggtattttcttttctctttcatttccaaataatcagtcaggaatggcacacaaggtgcattttgaaaaatgacactttaaagatttgtgggccgggaatggtggctcatgtctgtaatcccagcactttggaaggccgaagttggtggatcacctgaggtcaggagtttgagaccaacctggacaatatggtgaaaccccgtctctactaaaaatacaaaaattacctgggtgtcgtggtggatgcctataattccagctactcaggaggctgaggtaggagaattgcttgaacctgggaggcggaggttgcagtgaactgagatcacgccactgcactccagcctgggcaacaagagggagactccatctcgaaaataaataaataaataaataaataaagatttatgatcaagtaacttaactacctggacatcccctcctggcataaaaaacaaaacctatgaagccaccctcggctgttgtccaattctattccccaaaaggaacttctatcttgagtcttgtatttactattccttttcattgtctctaaagatttttacaataagtatatatatatccaaatcacagtttgacctgcttttttaaacttccccgtacagagaactcacacaatgtgcattcttctgtgatgctgatgcatgttatgtgtaggagagttatctctgatgtgggagggtgctgttcattcactgttgctgctgaagttttactttttattattatacgacaattttgttaattcccattgatgtatatgtgattgtttctagtttttgccataaacattggtgtacatgtctcctggacacatagccaagaatgtccccagggggtatgatcaggaggcagatggtgggattatatgatgtatggacattaatcatactagataaggctaatttgatttctcaagtgcttgtaccaagaatgggaaagagcttgtgttgctcatgtgttctgaaaacattcagttggagacagaaattaaatgttaaaaggtactgtcttggctatagaatcaccctaggcattttttcatattccattaacaacttccttttctttacttttatattataaattacggcattatacttttagcataaagttcaaataatgcttccttttggcctaaacacttggagtttatgaaaaaaaatggagggagggagaaagctctgagggaggaaaggaggaaagaaggaaggaaggacagagaaagacaaaatttgaaaatgttcaaaaataggaggaaagagttggaaacagcaagtatagctaatgttattaaaatgcaagggattaaaagatatgtagataatatccatggaaaatggaaacttaagaaagccttaatagttatctagtgctgtgtcacaaactacctcaaaatttagtagcttaatagaacaaatatctgttaactcaaagagatactacacacacaagtaaaatagattctgtgggggtggcagaagttggataaagagaaggattttacaggttggaataagagttattgatatgcagatggaaataatttttagtccaagtccttcaaggagcagatgccaagatgagcttaaagtctgcgacatcttatgaggggacacacccgtaagggaatatgggaagtgagccagaaatccctggaaaaggcggcagaccacgatgcaagtgtgaccccaagtgctggacagaaggagagaaagtttgttcgacgcatcctagagcacaggcaatctaaggagagttgagcaaggccgtggaggagccttccagctacagttggccatcagaggagtcccgtgtctcccaggaatggcttgccttaacgcctgctgtgaccagtcactggctgggaacagcccatgggaagcagggctttgcaccaatcctgctgaggatgtcagagcacaggagcacagccttgggacattacctatgagtatcgctcaatccttccttcctgagggttctgggctcttgaatatgaaaccctctcaggctgggttgctggatgattctgctcacacttacaacaggacaaggggaaccataaggtctccaagtggatctcttatttccacacacacatctcctgccctccttgtgtgatagcagccctgcctcctcctcttctcacctgcttgtatctggacacatactattcaaacatccctgggggcagccataatgtgtatttccatggactctcatttaaatgtctccttgccagggtgccccctttgggaaaccaggacctcctcccctacagagcccagatattggagatgagaagtgcaaaatcaccctgaaggtgaatataagggtttagatatggagccacacctgcttctacttcttggtttttggacccacgtattcttccttctgtaaacacagcactatagagacatctttgattcaatacatgcaccacatcctgaaagatggcacccattcctcagagggtttcatccaagctggcactaagttgtgtctgtagagacctgtccatgactctgtgtggctggcagcccctgggaggtgcaggtggtgataagaccagggggtgccatggtcatggaccacgcttcatcccctttcctctgaggtgtgtcccgcgggcagataatgtactgaaattctgagccagtggctcaggaatgccaatagtgatactggctgagggtctaagagtagagaggaaaaccacaccacatctaataggtgcctatccctgtgaggatgaacctccgccccccgggccgcctcccacttgagctgggtgatctgagccgccgtgtctgcggctgtcaaggagcacaggtcctcgttcaggacgatgtaatccttgccatcgtaagcaagctggtgatacccgcggagtaggcgcccgtccgaccccacgtcgcagacagacatcctctagatgggtgtgagaccctggccccgcccccgcggccagccccgcccaccgagccccgccctcgccaggaccaacctgcggggattttggctgaaaatgaaaccgggtaacggctcctgggcctctcccgggtcaagggtctccaggtcccgctgcctcggcgtggatctcggacccagagactcggggagacccgggcggtccgtgggggatgtggaggggtagtgacctgcgcccccggccggtgtcactcacaggcctcactctggttgtagtagccgctcagggtccgcaggttcactcggtaaaactgtgctttggccttggcggtccctgtctcctcttcccaatattccggcccctcctgctccatccacggcgcccgcggctccatcctgggactcgtggcgtcgctgtcgagccgcacgcactgcgtgtcgtccacgtcgcccacggagaggaagcggggatccgcgcggccgggccgggacatggtggtgtggaaatacctcaaggagtggaagcctgggagcaaggagggggctgagaccctcccgaccctcctcccggcaccgcaaccgggttcctgcgcccccgccgggcaggcccctagctactccccacagacgccgtttccctcccgaccccgcactcacctgcccaggtctgggtcaggaccagggcccccgagagcagcagaagcagggttcggggcgccatgacaccatcctcggcgactgggaagaatcggagtcccggtgggtgcgtgggaactttagaaccgggaccgcggctacattgattggcttctctagaaacccgacactcaatgggagtgagaactggggcagcccggtgagtacccaggaagaaggacccgacacaggttgggagagggagaagagaaaccctgcaaagatggggaatgcccagcgctgggcctccccaatccatacaccgcctttggggcctgagatcctgagagccacgcctgaggccctgggacttcgccctgaccccgctacttctgtgccaagcgctctgtctcaatgtttccctgagtcttggcccaggagctgtctgagaaaccagggagaaaccctcggaatgggccccgtccctctctcttcactttgcatcacggaatccccgtcccagaactggactccctgcctcctactccttacctgtccccgtggactcttctagaagaaaaatcaccccagggagcttgttgccagagagtgagcttgccctgggaatggaggtgtagagacagggttttttgttgttgttgtttgtttgttttttaaatctggaaaagttgtgcctgagtgcatgagatagaatagagaccagtttgctttttgtttattaactacagtgggtagcagaatcttggtaactcctaatgatcaggaatctaatcggccaaaaatgtgactttggtcccttgacatataaatgtgtctaaaagcattacaacaggaatcacaaagctcctaagtttcactttcccagacaatgtatctgtgactcccgcttgtagtattttaaatttaccttcattccatagccctgagtttctgtgtgagtccaggacatctcctaatacaaggtagccactgtgttactatatgttgtaaccaggagccagtacggactttattcatctcacagtggcaagcactcaatgcagtcacaatgcccctcaccagtgctcatgcactgcctgtttttaggaagtatccacttctaagtgttgtgtatattttatatgaacacttagtattttttaaacctgattaacataaaaaaattagtttttaggcagacccacataaggtattaaaggccaactgcaaagatcaccctgcaaggctctgtagattgatgtattaaaatatataaaacaatgtgtttaaacctgagttctgctgctttcgaattctttccctctgctccatttcctcacctcctgcatctccagcccttccctccattcctctcatccctcaggccctcctctccccttagtccccaccaccttgtcactccttatttgtgacactagcactgtcccattacctgctacgtgactgttctctgcacagtggtcctgctcctgtgagtcagagtgtgtcatttctccacctaaaacattccactggctccaccttggtcttgtgaagcttctggaatgtcaggcacgtaagcatatgagggcacacctggttcattgtagggattaaattaatttttcttgactgaatgaatgaaatatgagtctattaaattgcatcacagaaaattataaaatgtaaaatactgaaaaagttaagaaatattttattttatgtaattagtgtgcatatcaattcatcaattcattcgtgcactaccacgactggcaaaacaacacccatttatctgcttatacttccttggtcagaaatctgggcaagatgtggatagaatccctgttctgggcttccaaaagctgtgttttcattttgaatcctccttcaggcttatacagaggtggcagaatgcagtttctggcagttgtaagactgaggtttctgttccttgctggctgtcaatacagagaataggcagggctgtgctcaattcctggtgcctaacagtgttctttcctacacagcctcttcattttcaaagcccacggtagaggaaacccctcatgctgaatccctctcacactgcaaatctctatgctcagaaagaacacagacctttcaaggactcaccttattaggacagtcaaagcaggataaacccagcctaaagtcaactaattgaggcccttagttatatctgctaaatcccttcacagcagcatctacactagagttgcttgaataactgggggaaagtgaatgaccgggaggtggctgttgggggccatcaaagaatcagcccagcaagggttggatcttccttttgtgtttaatttggacacagttggaaattgaagttcaagtaaagtgatcattgtgaatagtaataaaatgcatcctcttcagccatggacattctccttaccttttaaaactaagttacatgtgtaatgtcttataattaatttaggccaggtgtggtggctcacacctgtgattctagcaccgtggaaggcagaggaaggcagatttgttgactccagatgttgaagatcagcctgggcaacatggagaaacccccatctctacaaaaaaatttagaaaattagccaggcgtggtgcttcatgcctgtagtcccagttactcaggacgctgagataagagggtcccttgagcccaggaagtcgacactgcagtgcatggtgatcatgccactgcactccagcctgggcgacagagcgagaccctgtctcaataacaataatattaataataatgataaatttagagcaaatgcaaattaatgtgtaatactacatcctcttttgtgaaaatgtgttagttatttactattgcataacaaattatgtaaaacttagcagctcaaaatggcaaatattcatcatctcccgcaggttccaatggtcaggaatccaggagaggtttccctgagtgcttcttgctcagggcctctcacaaggttgcagtccagttgtcagcctaggcctgcatcatctgagtgcttcactgggactgaggattcacatgaaacatggatgggtcacatggctgttggaaaagccctagttccttgttttctgttcccagaaggccccagttctcagccacatggaccttccttcagggctgcttatggcacagcaggtggcttcccccagagctcatgattccagagacattgagagagaagggggaggctgcagtgagttttatgttctacacccagagtcacaaactcttatgtcagcattaccagttagaagttgtattagtccgttctcacattgctataaagaaatacctgagactgggtaatttataaaggaaagaggtttaattgactcatagttctgcattgctgagaaggctgccccatgaaacttacaatcatggcagaagtggaggcaaacacgtcgttcttcacatggtggcaggagagagaattgcagatcgaagtggggaaaaatacctcataaaaccatcagatctcatgagaattccctcagcatcataagagcagcatgggggtaccatacccgtgatccaatcacctcccaggaggtccctcccccgatacatagggattacaatttgcatgacaattcaagatgagaatttggtgggaactcagagccagaccatatcagaaatgcatcattaagtcccagccacactcaagagaggaaattaagcagcatctctggaagggaacagtattaaaggatttgaatatatattaaaagcaaatttaaaactcttgtttcaggattttgaaaatcaaaatttttttatctaattatttttcgttaacccttttagcttgtcttttaatttaatttaattttaagttccaggttatgtgtgcaggatgcgcaggtttgttacataggtaaatgtgtgccatggtggtttgctgcacctatcaaaccatcacctatgtattaaccctggcatgcattagctattttttcctaatactcctcccaccactgccctcccccagcaggcaccagtgtgtgatgttcctctccttgtgtccatgtgttctcattgctcatctcccaattataagtgagaacatgtggcgtttggcttttctgttcctgtgttagtttgctgaggatggcttccagcttcatccatatccctgcaaaagactgaatctcattcctttttgtggctgcataatattccatggtgtatatgtaccatattttcttaatgcagtacatcattgatgggcatttgggctgattccatgtctttgctattgtggatagtgctgcaataagcatacacatgcatgtatctttatagtagagtgatttattttcctttggatgtataccctgtaatgggattgctgggtcaaatggtatttctggttctaaatctttgaggaatcaccaaactgtcttccacaatggttcaaccaatttacatttccagcaacagtgtaaaagccttcctatttctccacaacctcgccagcatctggtgtttatgtagttttaaataattgccattctgactggcattagatggtatctcatttgtggttttgatttgcatttctgtaatcagtgatgttgagctttttttcatgtttttttggccacatgtacgtcttattttgtgaaatgtctcttcatgtcctttgttcactttttaatgaagtttttttcatgtaaatttgcttaagttctttatagattctgaatattagacctttgtaagatagatagattgcaaaaattttctcccattctgtagggtgtctgttcactctgatagtttctttttctgtgcagatgctcttttgtttaattagatcccatatgccaatttttgcttttgtggcagatgcttttggcgatttcatcataaaatctttgcccatgcctgtgtcctgaatggtattgcctagattttctttcagggtttttataattttgtgttttacatttaagtctttaatctatcttgagttaatttttgtgtaaggtgtaaggaaggggtctagtttcaattttctgcatatggctagccagttctcccatcaccatttattaaatagggaatcctttccccgttgcttgtttttgtcaggtttgttgaagatcaaatggttgtagatgtgcggactttttttgtgaattctctattctgttccattggtctatgtgcctgtttttgtaccagtatcatgctgttttgtttactgtagcctcacagtatacttttaagtggggtagtgtgctgcctccagctttgttctttttgcttagtattctctttgctatatgagctcttattggatccatatgaattttaaaatagtttttttttctaattccacgataagcttatcttttaaaattaatgattaactgtttcagacatcacagagccttgggtgcttaggagaaaacagtttgaaacagagaaaggatatgcaacagtaactctgaatttttcttgtgaatacctttaataacaatgttgttttcaattagttaacacagttgagaacatagagtaactagatcaaatagttccaagacttcagtctgataaaaataatgtcttgaaaataagactttgttttgtctaagatatctcaaatttagtggaagcacgtcccaagcaccaattttcttattgaaatatcatcttcactaaacatttgcctacacttaaaaaaaaaaacaaaaactccgctatatggagtagccattcttttgtttctttacttctctaataacttgctttcacttaggaaaacattgcctaatcaaattgcttttcatttacaaaagtgtgaatctcatacttcagtcaacacatctagcttagcatgatgccaataactttggtttgatgcagtagcctgaaatggttagctcaaattgagaaacaagtttttttcaaaagctagctatttggtgggcattacataataaacttaacatcttttgctctggtattgaatgagatgtgatagaagtcatttgcacaccactatgattctaaataacacggctattatgtgcttctgaagctttttttctttttagcagtcctattctgttttccattcatatttgatattccatcactggttattccttcctattcttttcttgtttgatttattttgatcaattatttgcatttccaattccgtaaaagtttaattcagttgtatgtgtggtagaatgtaacatcaaatcctttgcaagatggaattaccttgcacagcagattgaacattgtataactgaaaatctagagagatgccagtcagccaagggttaaatgacctatttttagccaagtccattttcatggcatcctggtcctctctgtcacatgactccttacaattctctgtggtttgcttccaatgtaagtagttcttattaaggatccttgcaattaactttggtattcttttctcttacatttttttaaaattatactttaagttctatggtacatgtgcataacgtgcaggtttgtcacatatgtatgcatgtgccctgttggtttgctgccctctttaactagtcatttacattaggtatttctcctaatgctatccttcccccatcccgccacctgacgacaggccccagtgtgtgatgttccccaccctgtgtccaagtgttctcattgttcaattcacctatgagtgagaacatgcgctgtttgattttctgtcttcgcgatagtttgctcagaatgatggtttcctgcttcatccatgtcactacaaaggacatgaactcatcctttttatggctgcatagtattccatggtgtatatgtgccacattttcttaatctagtctatcattgatggacatttgggttggttccaattctttgctattgtgaatagtgccacaataaacatacatgtgcatgtgtctttatagtagcgtgatttataatccgttgggcatatacccagtaatgggatggctgggtcaaatggtatttctagttctagatccttcaggaattgccacactgtcttccacaatggttgaactagtttacagtcccaccaacagtgtaaaagtgttcctgtttctccacatcctctccagcacctgttgtttcctgactttttaatgatcgccattctaactggtgtgagatggtatctcattgtggttttgatttgcatttctctgatggccagtgatgatgagcattttttcatgtgtctgttggctgcataaatgtcttcttttgagaagtgcctgttcatatcctttgcccactttttatggggttgtttgatgggtagactgcaaaaattttctcccattctgtaggttgcctgttcactctgatggtagtttcttttgctgtgcagaagctttttagtttaattagatcccatttgtctaatttggcttttgttgccattgcttttggtgttttagtcacgaaatccttgcccatgctgatttcctaagtggtattgcctaggttttcttttgggttttatggttttaggtctaacattgaagtctttaatccatctggaattaatttctgtataagttgtaaggaagggatccagtttcagctttctacatgtggctagccagttttcccagcaccatttattaagtttcccagcacctttccctattgcttgtttctgtcaggtttgtcaaagatcagatgattgtagatgtgtggtgttacttctgaggcctctgttctgttccattggtctgtatctctgttttggtaccagtaccatactgttttggttactgcagccttgtagtatagtttgaagtcaggtagcgtcatgcctccagctttgttcttttggcttaggattctcttggcaatgtggtctcttttttggttccatatgaactttaaagtagttttttccaattctgtgaagaaagtcattggtagcttgatggggatggcattgaatctataaattaccttgggcagtgtggccattttcatgatatggattcttcctatccatgaacgtggaatgttcttccatttgtttatatcctcttttatttcattgagcaggtttgtagttctccttgaagaggtccttcacatcccttgtaagttggattcctaggtattttattctctttgtagcaattttgaatgggagttcactcatgatttggctgtctgtctgttattggtgtgtaagaatgcttgtgatttttgcacattgattttgtatcctgagactttgctgaagttgcttatcagcttaaggagattttgggctgagatgatggggttttctagacatacagtcgtgtcatctgcaaacagggacaattttacttcctcttttcctaattgaataccctttatttccttctcctgcctaattgccctggccagaacttccaacactatgttgaataggagtgatgagagagggcatccctgtcttgtgccagttttcaaagggaatgcttccagtttttgcccattcagtatgatattggctgtgggtttgtcatagatagctcttattattttgagatacgtcccatcaatacttaatttattgagagtttttagcatgaaggttgttgaattttgtcaaaggccttttttgcatctattgagataatcatgtggtttttgtcgttggttctctttaaatgctggattatgtttattgattttcgtatgttgaaccagccttgcatcccagggatgaagcccacttgatcatggtggataagctttttgatgtgctgctggattcggtttgccagtattttattgaggatttttgcatctatgttcatcagggatattggtcgaaaattctctttttttgttgtgtctctgcccggctttgctatcaggatgatgctggcctcataaaatgagttagggaggattctctctttttctattgattggaatagtttcagaaggaatggtaccagctcctccttgtacctctggtagaattcggctgtgaatccatctggtcctggactatttttggttggtaagctattaattattgcctcaatttcagagcctgttattggtatattcagagattcaacttcttcctggtttagtcttgggagggtgtatgcgtcgaggaatttatccatttcttctagattttctagtttatttgcatagaggtgtttatagtattctctgatggtagtttgtatttctgtgggattggtggtgatatcccctttatcatttttattgcatctatttgattcttctctctttattagtcttgctagcggtctatcaattttgttggtcttttcaaaaaatcagctcctggattcattgattttttgaagggttttttgtgtctctatctccttcagttctgccctgatcttggttatttcttgccttctgctagcttttgaatgtgattgctcttgcttctctagttcttttaattgtgatgttagggtgtcgattttagatctttcctactttctgttgtgggcatttagtgctataaatttccctttacacactgctttgaatgcatcccagagattctggtatgttgtgtctttgttctcgttggtttcaaagaacctctttatttctgccttcctttcattatgtacccagtagtcattcaggagcaggttgttcagtttccatgtggttgagcagttttgagtgagtttcttaatcctgagttctagtttgattgcactgtggtctgagagacagtttgttataatttctgttcttttacatttgctgaggagtgctttacttccaactatgtggtcagttttggaataagtgcggtgtggtgctgagaagaatgtatattctgttgatttggggtggagagttctgtagatgtctattaggtctgcttggtgcagagctgagttcaattcctggatatctttgttaactttctgtctcattgatctgtccgatgttgacagtggggtgttaaagtttcccattactattgtgtgggagtctaagtctctttatatgtctctacggacttgctttatgaatctgggtgctcctgtattgggtgcatatatatttaggatagttagctcttctcattgaattgatccctttaccattatgtattggccttctttgtctcttttgatctttgttggtttaaagtctgttttatcagagagtaggattgcaacccctgcctttttttgttttccatttgcttggtagatcttcctccatccctttattttgagcctatgtgtgtctctgcacgtgagatgggtttcctgaatacagcacactgatgggtcttgactctttatccaatttgccagtctgtgtcttttaattggagcatttagcccatttacatttaaggttaatattgttatgtgtgaatttgatcctgtcattatgatgttagctggttattttgctcattagttgatgcagtttcttcctagcctcaatggtctttactatttggcatgtttttgcagtggctggtaccagttgttcctttccatgtttagtgcttccttcaggatctcttgtaaggaaggcctggtggtgacaaaatctctcaggatttgcttgtctgtcaaggattttatttctccttcacttacaaagcttagtttggctggatttgaaattctgggctgaaaattcttttctttaagaaagttgaatattggcccctactctcttctgccttgtagagtttctgccgagagatcagctgttagtctgatgggtttccctttgtgggtagcccgacctttctctctgtctttccttaacattttttccttaatttcaactttggtgaatctgacaattatgtgtcttggagttgctcttcttgaggagtatctttgttgtgttctctctatttcctgaatttgaatgttggcctgccttgctagattggggaagttctcttggataatatcctgcagagtgttttccaacttggttccattctctccgtcactttcaggtacaccaatcagatgcagatttggtcttttcacatagtcccatatttcttggaggctttgttcatttctttttattcttttttctctaaacttctcttctcacttcatttcattcatttgatcttccatcactgataacctttcttccagttgatcgaatcagctactgaagcttgtgcattcatcacttagttctcgtgccgtagttttcagctccatcaggtcctttaaggacttctctgcattggttattctagttagccattcatctcatcttttttcaaggtttttaacttctttgtcatgggttcgaacttcctcctttagctcggagaagtttgatcgtctgaagccttcttctctcaactcatcagagtcattctccttccagctttgttccattgctagtgagtagctgcattcctttggaggaggagaggcactctgatttttagaattttcagtttttctgctctgttttttccccgtctttgtggatttatctacctttggtctttgatgatggtgacgtacagatggggttttggtgtggatgtcctttctgtttgttagttttccttctgacagtcaggaccctcagctgcaggtctgttggagtttgctggaggtccactacagaccctgtttgcctgggtatcagcagtggaggctgcagaacaatgcatattggtgaacagcaaatgttgctgcctgatctttcctctggagattttgtctcagaggagtactcggccgtgtgacgtgtcagtctgcccctactggggggtgcctcccagtcaggctacttgggagtcagggacccacttgaggaggcagtctgtctgttctcagatctcaagctgcatgcgggagaaccactactgtcttcaaagctgtcagacagggacatttaagtctgcagaggtttctgctgccttttgtttggctatgccctgcccccagaggtggagtctacagaggcaggcaggcctccttgagctgtgtgggctccacccagctcgagcttcctggccgctttgtttacctactcaagcctcagcaatggcgggcacccctcccccagccttgctgccgccttgcagtttgatctcagactgctgtgctggcaatgagcgaggctctgtgggtgtaggaccctgcgagccaggcatgggatataatctctcggtgtgccgtttgctaagaccataggaaaagtgcagtattagggtgggagtgacctaattttccaggtgccatctgtcacccctttccttggctaggaaagggaattccctgaccccttgcgcttcctgggtgaggcgtggcctcgccctgctttggctcacacttggtgcactgcacccactgtcctgcacccactgtctgacagtccccagtgagatgaacctggtacctcagttggaaatgcagaaatcattcgtcttctgcattgctcaccctgggagctgtagactggagctgttcctattccccaaattaatttttgttgactgaataaatgaaatatgagtgtattaaaatttaatttcatcacagaaaattataaaataaacaatactggaaaagattgagaaagtttttattttatgtaactagtgtgcatatcaattcataaattcattccatttgtctgttgagactgtacgaattttatgactgcataacaaattatcacaaatattggctttaaacaatacccatttatttaattaattcatttatttttagagaaatggtctctttctctcatccattttgaagtgcagtcacacagtcatggctcactgcagccttgaaatcctgggctcaaaggatcctcctggctcagtcttcagagtaactagaactacaggcaaatgccaccacgcccagctaattaaaaaaaaattgtagagatgagggtctcattgcattacccaggctggtctcaaattcctgagtgtaagtgatcctcctgtgtaagcccctcaaatgttaggattgcaggtgtgtgctaccacacctgcccaaacaacatccactgatctgtttacagttctttaggcagaaatccaggcatgatgtagacggggtctctattcagggcttcccaaagctgtgttttcattttgaatcctccttcaagcatatatagaggcggcagaattcagtttctgacagtcgttaagactgagtttcctgttccctgctagctgtcaaggtagagaggagggagggctgtgctcaatgcctggagccaaacagcattcttttctagtcagccccttcaatttcaaagcccacagtggaggaaacccctcacactgaatccctctcacactgtgaatctctatgctcaggaagaacccagtcctttcatgggctcacctgattaggagtgtccaagcaggctaaacccagcctcaagtcaactgattgaggaccttgattatatctgctaaatcccttcacagcagcacctacagtagagttggttgaataattgggggaaggtggatgaccaggagctggttgttggggctattatagaatcagcctagcaagggttggattttccttttgtgtttaattgtgacacagttggaaattgaagttcaagtaaagcgatcattgtgaatgataataaaatacatcctcttcagccatggagattcaccttacctcttaaaatcaagtgacaggtttaatagcttataattaattcatgccaggtgtggtggctggcacctacaatcctagcactgtggcgggcagaggaaggcagatccattgactccaagagtttgagatcagcctgggcaacatggtgaaacctccatctctacaaaaacattagagtattatccaggcatggtggttcatgcctgtagtcccagccagctactcaggaggctgaggtcagaggatatttgagcacaggaagtcaacacagcagtgaatggtgaacatgccactgcactctagcctctgtgacagagcaagatgctgtctcaaaaatagtaataatcatgatcataaatttagagcaaatgaaaattgaagtgcaataaatcatcctctcttatgaaaatgtattagttatttactattgcataacaaattacataaaacttagcagcgcaaaacaacaaacatcatctaccgcagtttccaatggtcaggaatccaggagcaaggtttccctgagtgcttctggctcagagcctctcacaaggttacagtccagtccagggctgcatcatctgagagcttcactagggcttgggatttacaagaaacatggctcactcacatggttccttgttgtccggtcccaggaggcctcagtttttagccacatggaccttcctgcagggctgcttatggcacagcagttggcttcccccagagctcatgatcccagagacagagagagagaagctgcagtgagttttatgttctacacccagagtcaaaaactgttatatcagcactactctatcagttagaagttgtatttgtctgttctcacactgctataaagaaatacctgagactgggtaatttataaaggaaagaggtttaattgactcacagttctgcatgactgaagaggcggcctcaggaaatttacaatcatggcagaaggggaaggaagcatgtcattcttcacatggtggtgggagagagaaatgcaaggttgtcaggggcgggggtggcagggaagactcttgcaaaaccatcagatctcatagaactcactcactatcatgagaacagcatgagggaaccatccccatgatctaatcacttcccaccatgtctttcccctagcacgtggggattacaattcaagatgagtttgggtggggacacagggcgaggccatatcagaagtgcatcattaagtccaagccgaactcacagggaaggaattaagctgcaccattggaagggaggagtatcaagggatttgcataaatgttgaaagcaaaattaaaattattatttcaggattttgtaaatcaaatgcttctttcatgtgattatttttctttaatgctttaagcttctttttaatttttattttaagtttcagggtacatatgcaggatgtgcagatttgttacataggtaaacgtgtgccatggtgttttgctacacttatcaacccagcacctaggtattaagcctagcatgaatgagctatttttcctaatgcgcaccccacctctgccctcccccaaaaggacacagtgttcccctcccagtgcccatggattctcattgctcagctcccaattatcagtgagaacatgcagtgtttgtttttctgtttctgcattagtttgttgaggataatggcttccagctttttccatgtccctgcaaaacatgatctccttcctttttaaggctgcatagtattccttggtgtacatgtcatatgttttctttatccagtctattgttgatgcgcatttaggttgattccatgtctttgctattgtgagtggtgctgcaatgaacatacacatggatgtaactttataatagaatgatttatatttctttgggtatatacccagtaatgggattgctgggtcaaatggtatttctagttctagatctttgaggaatcgtcatattgtcttccacaatggttgaactaatttacattcccaccaacagttaaagcattcctatttccctgcaaccttgccagtatctgttgtttcttgactttttaataatcaccattctgactggcatgagatggtatctcattgtggttttgatttgcatttctctaatgaccagtgatgatgagctttttttcatatgtttgttggccacatgtatgtcttcttttgagaagtgtctgttcatgtcatttgcccactttttaatggggttgtttgttattttcttgtaaatttgcttaatttccttgtagattgtggatattagatctttgtcagatggatagattacaaaaattttctttcattctgtaggttgtctgttcactctgatcacagtgtcttttcctgtgcagaagctctttagtttaattagatcccatttgtcagtttttgcttttgtggcagatgcttttggcgatttcatcataaaatctttgcccatgcccaggcaaatggtattgcctagattttcttcttgggtttttatagttttgggttttacatttaggtctttaatccatctagagttaatttttgtgtaagatgtaaggaaggggtccagtttcagttttctgcaaatggctagcccgttttcccaacatcatttattaaatatggaatcatttccctgttgcttgttttcatcaggtttgttgaagatcagatggttttagatatgcggttttatttctgagttctctactctcttccattagtctattaccatgctgttttggttactgtagcctgtagtatagtttgaaatcaggtagtctgaggccgcctgctttgttctttttgtgtaggattgtccgggctatatgagctcttttttggttccatatgaattttaaaatagtttcttctaattctgtgataagcttctctttttaaattaatgattaaaagtttgagacatcacagagccttgggtgttgtggggaaaactgtttgagacagagaaagaggatacaatagtatgtctgagtttttcttgcaaatacctttaataacaatattctcttcaatgagtcaacagttgagaacccagagtaactagagcaaatattccaaagacttctgtgccgtaaaaataatgacttgaaaataagtctttgtttcaactaaggtgtctcacatttagttgaagtatgccccaagtgccaattttcttattgaaatatcatcttcaaaaaacatttgcctacacttaaaaaaaagggctgttgtgtctattgagtagccattcttttgtttccttacttctctcataaacttgatttcactttaaaaaatttgcctaattggttttaatttacaaaaatgtgaatctcatacctcagttaacacatctagcttagcaagatgtcaatagctttggttggatgcagtagcccaaaatggttagctccaactgaggcataagatttttcaaaaactggctatttggtgagcattctataataaacttaacatcttttgttctggtattgaatcagatacgatagaagtgatttggacaccactatgattctaaatagcactgcaattttgtgctttcaagtttttttgagcaatcctgttgtgttttccattcatatttgctattccatcactggttgttcctttatactcttttattgtttcatctattttgatcaatgatgtgcatttccaattctgtaaaagtttaattcagttgtatgtgtggaatatgtaacaaatcaaatcctttgcaaaatggaattaccttgcacatcagattgaatcttgtatacctgaaaatctagagagatgcctgtgagccaaggatcatatggccctttagccaagggtattgtcatggcatcctgtaaggagcctctctgtcatgtggctccttacaattctctgtggctttcttccaatgtaagtagttcttgttaaggatccttgcaatgaactttgatatttttttctttcattttttaagaaacaggtatattttagtttgaaaaatactgtttaaggagttataatctagtagttacctgggttcccagcactggcataagacacagaacccgcaaagccaccctgggctgctgcccactcacatcccccagaatgagaccccatcctgagtcttgtttttattattactttgtatttctttaaatatttgtacaataagtatatataatctcaaaccaaatattagtttcactggtttttaagcttcctgtacagaaattcctactacatttcttttctcatgatgcacattatgtataggagttatctgttgtgtgggaggctgtcattcactcatttttactgctgaaggtttacattttatggttataccacaatttcactactttgctattgatgtataggaggctgattccagtttttgccataaacattagtgtgcatgtctcctgggcacataggcgagaaagccgccagagtgtatgattaggagtgggatggttggatgatatgttgtatggcctttaaccatactaaataatgataatatgatttccaaagtaattgtgccaacttaagcttttacaataaatgtgtaatatgtgatgttgatgtgttctgaaaacactgagttgaaggaattaagagttaatagcaactgccttggctgcagaattatagcagattttttttttttttgacggagtcttgctctgtcgcccaggctggagtgcagtggcacaatctcggttcactgcaagctccacctcctgggttcacgccattctcccgcctcagcctcttgagtagctggggctacaggtgcccgccaccacaccggctaattttttttttgtatttttagtaaagacagggtttcaccgtgttagccaggatggtctctatcccctgacctcgtgatccgcccgtctaggcctcccaaagtgctgggattacaggcatgagtcaccatgcccagcctatagcaggcattcttattcagactctgttaataacttcctgttgttaacttgtatcctatataccatggctttatacttttaacatatagattcagaaaatgtttccttatagtacaaacacatagggttattttatatgtcagaatgtcataataaaaaagaaaaaaatggaggaaaggagagaaagaaggagagaggagtgaaggaagcaaagaaggaaggggaagagaaggagggagggagggcaaatggaaatagaaaagaaagagagggagggagagatagaagtgagaagaaagggaaggaataaaggagaaaagaaacgaaaataaagaaaaaaacaggcgtagagaaactaggaacccaatatatggctaatattatcaaaatgggaggaaataaaacggatgtatttaacctctatagaataacagaaatgtaagagggcttcattagttatccattgctgtataacaaactacccccaaatttagtgacttaaagcaacaaacatcgactatctcaaaagcataatacaaatactagcaaaatggagccaatgcaggtagaagttgaacaaacaaaaggattttacaaattggagtaagtaagaggtcactggtgtgcagatgaaaatgattttgcattccaagtgccatcatgggattaaagttacaggattttattaggggacacacctgtcagagatatagcaacggaggcaggttaccctgggaaaggcaacagaccaagatgcaaatgtgacccccagtgatggacagaaggacagaaggtttactggatgtgtcctagaccacaggcaatctcaggagagttgagcaaagccatggaggagtctttgagccactgctgtccgtcagaggagtccctggtctcccaggaatgtcctgcctcagtgtcactggtgtgacccatcactggctgggaacagcccatgggaagcagggtctctgcaccaatgacactgaggatgtcagagcacaggagtggggccttgggtgattacccaggagtgtggctcaaacctcctgtcctgagaggtctgggcccttggaaatcaaatcctctcaggctggattgctggatgattctgctcacatttacaaagggacaaggcaaaccagaaggcccccaagtagatctctggttctcacacacacacttctgccctcattgtgtgaaagtagccatgcctcctcctggagagcaggatctattacctgcacctggagaggaagagactccttttctcaccagctggtctctgggcacatactgtccaaacttctctggtgacaaccataatgtgtagttcaatgggctgtcatgtgtctccttttaaggacctcctgccctgaacagcccaaagttgggagataaaacgtgcaaaataccccagtgggtgaatctaagagactggacatggagacaaacctgcttccaactttcggtttctagacccacatattcttcctattgagaacacagcaccgtagagatgtctctgattcaaacaatgcaccatgtcctgaaaaacggcccccacccctcagagtgcttcctccaggatgacactgagttttgcctgtagaagacatttccagcattccttgtggctggcagcccctgggtggtgcagatggtgatcagatcagtgaaacccatagccacggaaacactggaactttccctgccaagtgggtccttcaggcagatactgggttgggagcaccacctagcctgtggatcaggaatgtcaacagcacccagagagtggtgctggctgagtgtccgagagcaggacaggaaaactcacccatggaatatgagcctacccctgtgaagatgaacctcaggcccttctaggatggaagtagctaaatgtagtcaacttgttacatagtggctagttagtcacctaaagaaatagtgccccactagggcacatggtgggcctcaaatgctgatgagttggacattcagaggtggcagcagctggatctgtcttgataatggggagtcagtacttctggccccatatgtagcctcatgcctgccactgtgcttgctccattcatgtgcccatcctaccaggcctgcattgacccatagtgaaggctggctaacttccatttgtctgtttggttgttcagtgctgcttcagacttgggtgttttctgggggtgtcaacatgggattcaagcacaacccaggtggaccattttcacctcatgatgaatgctgttgggcctgtccaatctatgactttctgggtcacacagaagccaattcacacaggtacttggaatcacatcgttgcttggtgtcctgtggttaagcattctatcgaatcaggaccaggaacactaaaagttgcttctaatggggagccatgtctctgctgtggatgacatgatcttactccagatcccaggccctccaccatgactctcccactgctgcttggttcagctccatcctgcatctttccccacccctgccccttccagtaccaagaggtctgagggatggtggctgcaccgcagcctgtatctgctgcagggtgctttcctgtgtaggcctcacttgaagctggcctcctcctatgtcacctagagtgtgggccaaagcaacatttctacatgtggaatgtgctgtcgtcagaactccaagagtgctttctttttttgcagtaaggatgcaaaatgcaacactttgtaatttacctaggaggggacacccctggcattcccctaaacactggactcataaaacttcactacagtgacctttcctgaagctctgtaaggtttatcttcaccttctgaagtgcaaatgttttgccaacgatgccagtgcactttctacctgctgctcattcgccccagtcaacatgaagttgtaaatgaaatgagctgatttaatatcctttaggatatccagtatgtctagtatagtcataagactatactatagaggacaggggagttacaaaagtcctgaggcaaactataattcaatgtgttgtggatcccacatgaatgtgaatcactccatatcccctttgtaattggaatggaaagaaatgcactcaccaaatccacagctgcacactgtgtgcccaaggctttgttaatctgctctaccagtgatatccagacagcacaaaagctgcacttataactcctacttggccatatctggagtaatctcattcattctttaggcctcactaggcttcctcagggacagattgctggattacacggagacaataggcagcctcaacaccaccccgcctccttcagctttgtaatggtggtgtgacccccacaatacttgcagtgtccttcacaagacccacgctgggacacactatgatttttgatttggccaggatgggggcagtttcagaggtttccctttggcctttggcatcaagagatcccttataccacagactggggacccagtgtgggggtgactccacttaccagagcatcagtgtcaattatgcactcagggaattggaagataatcagggttgggtctatgcatccagtggtcccattgcgggccataatgtgtccaggtttactccctggcctccgtaagccccactgtgatggagaagatgattgtgctgtgggcatctgggcatcaatatcagcttacatgcagtgaaaatgatcccccctagttctgcctatttcccttccccaatgtacagtctcctgagtaaatggctataggttcccttgctgaaagactgagggaattgtcccagccatatacctccatggtgtcccagggtcctttctctagggatatggactcctcctctgtcactgagatctgagtctgaatcttgattgaggtctaggcattgagaaggggatcatggctttgtatttggtcgaacaccctcagtctcctgctcctcaattcttgctttcttatcatatatatcaagcagtgcccttgttggctgcctcttgtaaccctggtgtcctctctactaactttccccacactccctgcagcttgagtccccttggctgctcctctgaggttgccatggtaaccatgccctccggcttttgcaggtcactgccaccacttgttctcagtctcttcaggcccacattctccccagagatatgaataagcacaactctgggacctttactatcattacccccagcctgcagaggataacaccccgacacttcttagtgatgcaggtccctctccacagcatgttcctgaggctctggtggaagatgtgccctctgggtcctcttgtggagcatggtcctggtgggccttcatcacgcccacttccctcagccttgttattgcatcctctacatgttccaggataactaggtcatatctaccttgttgagagttgggcatcattttttccagtctatatggactcaccccagtagtgggtttaccccatgtcctgggttctttgataaacccatgtcctgagaaagtgcctccaagccaaaggatttttattcatccagactgaaattctagtttattgatcaaatgccctcaaattccaatcccagaagtgcaccccaggcccctatggggacatgctggctagttcctgcaaagctcctgagtgggattcctgctgcatcgtaggagtgaggcttctgtagcatctttcagcataggaagtgggaacgattactagagaagggtgagcctcctctgcatgcccagggggtcctggaggagggcacccatcagataactctgttctagtttgcagaatctgaggttcccccaccagggccctgactttcctataaaaggcctgtgttggctgagtatcaaacgtctctggagcactgtgcccaccataatgatgttcagctaccattccatgctatctgctcttttgatccaggagataaaggcctctccatgagacactgcagagactctcacacatagccagtgacagctgttaacaacctgcagattctcattatccttttatagagcatcaacacagctgggaagtaaccagccaactccactgtctttgtgggtttacccccaactccatcattattgtgcagggcattctatcaccacatctgccatagcttcccctaaccagagcatcttctcaggttagcactggtgagacccacggcactcagacgcaacttctctatggactttctttgtcccccgctaacctagatggcatcctcttggcctgacaggcagtgggaaagcttatttcaaatttccagttttggtcattttcatggatcgcccttgataccacttgtgatagctgcggtcctgaacttagaccccaatacagtattaaatgtgtaaggatttattaggggaaatagttgtgagagaaaatcaggatagagacagaaatgctggaaaagccatcagatcacaatgcaactctgagtcccagtgaaggagagagggcaggaaggtcagctggaagcatcctagaccctgtgtaggctaagggaagctcagtagggatggcagggagtcctggagcctcagccagccttcagagtaggaatattcttgccttagttttcctgctttggtcaatcattggttggaaaaagctggggcaggtgtggtctcagatcaaacgtgacaatagatttcaggctgcgacagctgggacatcatcaattattcttcctctacctgagggcctgggatgtgcatcctcatgagtgccacaatgatccactggaataaaaggaaaagggatgacaatagagggaaaaaaaaggtattaattgatgagctaacactttaagtagatgagaagggatgatgttcagggcaccagcagaggaactggctctggctgggagcaggatggttaacacacagcaatcccccatgtagtaaaatgcctgacatgtggtgcagctgcaaatgcatgagcagacggtggtggaatctgtgaagttgtcttctaaatgtgttcagttttctcagtgaagtaggaagcaagatcatcagcggaagtaagaatggggaaggaagattggatgtgtgaggacagagagaaggtatgtaagagtcacccaggccaggaggaggctgagagtgagccatgcagggagagggtgattgctggctatggtgggggctccccatgaggtttgggtcgtgaatgtagagagaacagtcagcatgctgtgtgctgctctccagcctcctgcagcttatgggggcaggtgcagtgtaggctgaggtggaatccactagctgtgtagttttgccaggcaagtgtgacaacgaaagggagaggcaagggagggatggaaattatttactacagaatccaaaatggatgaggagggaggagaggacaacaaacactaagggagaaggaatagatagcagcatcactggattgggaatttcaagggggtggaaaaattattggaatagatgtactacagaatggactccatgcctggaaagcaggcacacatgcaatgagtggttcactgatgttacattatagcatatgatcaaattatagcatcagtgtcttcagagcctgtggctaccctgcaaggggatgagtggaaagatggccagagagtgggaagtgtgagattgagagtgtggaagggctggggttctttgccatgatgaggcctaggggaggacaaggtcctgagattccggcagagagaggagatggtaatgaagaaaaggagttccaggatctgagaggccagggagtgagggcatcttctctgctgtataggtgtctattgctgccataaaaattaccacaaaccaagcagctttaaacagcacctaattatcatgtcacagttgcgtgggttgcaagtccacccagtctcacggggctaagatcaaggtatgggcaggtctgtgctccttcctggagaatctggggaagagtccacatccaagcttattcaggttcttgtctgaattcacttcctgcagatagaactgagcttcccacttcctttttgggagcacccttagatcctagagacttctctctggtgcctaaagcacatccaatcctcctgcttggaaccactgatctcccctttgctgtgtctcctctgccttccttctctgcagcatgtgactccatctagagcagattctctccttttaatggctcatgtgatttgatcgggcccacacagagagtccaggattatctccctactttaaggtcttttatcttcattacatgagtaatgtcccttttgccatgcaatgcaacctgttcaccgactccaaggactaagactggatctctttggggactagtactcagcccagcacatctgcatatgttgaagtcagaaagaatcaaggagacagcactgctggagagggtgacagtgatctaggagctacaagagttaggattgacaggaatggcttggggcccacagggaatggctacaatgaggggagcggggccttagtctgttgacagcttaggggttttagggaggagggaggcagaaaggtctgagaaccacagtgaagagcaaggaccccacctcacctctgaacccaggggtacaagttgctgggaaactcccccatgtaggggaacttcagagtgggtcacatcctcaggaagacctggttcctgctagagcttcgaggtgagggagcatcctgagagagaatgaggaggttttgctgatcatggactgaggattccagggagtacagagggaagatttctggagttaggtaggggacatggtggggggacagaatagagcgtgcggagccttgtggggatgcaagtgctgggtatatgggggacccagtgtgactgacacaaacagggaaagggcatgaggagctcagtcctggtggactcgaggcagacgatggtgctgaggctgtgggagatgaaggaggaggagcaggggtggctgtcacctgggctctctccatggaggtgaagacagtgaggtggttgggtcttagtgctgtgtggaccttctgatgactggatggagtgtctgagggaggaggggtcttagaggattcactcgtgaccctgagggagggtatgttctcacttcaggtctcaggtgtgccctgacacctttctttgtggcttagggctccctactgtaaattattggggattagtaccttttggaatttgtaacttaaagcagaaactcagatggtcgaaatgtcattttcatgaaggtttgttattagcgtatcatttagattgtcttgcaaaagtctcattttttgttgtttttctaaagggctgtcgatcttgttttaaatttacaaatattgataatttatctccactgttaattggttgggggttgtttaattttgtactgcatagttttacatatctataacaacagtggtttgggcctcttatgttctaataattaagactttaagctgtgtacacattgcaattcaagtatgagtcatgcataaccctggcactaagagacaagagggaaagtccttctctcctaaaattttgcaaaggttctgggttctttttccactgagtgggaacaagtcagctagtgaggaacatgaggtctttggcctcatcgaaaggtgattcatctcccaactgtgagaagcactgaccactaggaagacctccctgcctggtccctggacccctacaccatggtagaggctatcttccctcccactgcaaagtggtatcccagatagcaagctggttagctgctgccagctcttgggtagttttgtcttctaaggcatgggtttttatctgaaaatcttccccttcccagatgacccaaactggggccacccactcttttctgagccacctctgcccagagacctgtggctatgtcctccagtcacaacagaacaccctttcagaacaccctgcaggaagctgagatctctacagactcacatgaatggtgtgtgcacagagctttggttctagttcaggaggtgtggagtgaggctcgctagtccaacagagcttgaggctagtactagtgtcatatgccaggaggcaaggttacaggggatacaaagtgtccagacctaccagagaaggcaaacccctgtaacaggcagggctagacagggacaagaaacaaggtcattctgggccagcaagaagagggaaagggaaattacagacatatctcagagagattgcagatttggtttcagatcatgcaaacaaaacaagtcacacaatttttttgtttttgtagtgtacataaaagttatatttatactttagcctattaagtatacaatagcattatgtataaaatagatatgtacataccttaattaaaaattacactactgctaaaaaatgctaacagtcatctgaggcttcagctaatactaatgtttttgctggagtagggtcttgcctcaatgttgatgactgctgactgatgacaaggtggctgctgaaggctgctgtggcaacttcttaagacaataaagtttgtggcatggattgtaaggtgggaattagtacataagtaaggtcaatatgagttttcaagtcaagtggacctgaatatgaacccttcaggcctttccaccagctagctatagaaccctgggcacatctggcccacaattggccctgacagacactttcacagtgaatgagtgctgaatgaaaccatatgagtcagtttcctcatctgcaaaccagtgatgtaattcctgccttgccaattcagaagaatacatgagaagaaacatagtgccaagaaaaacagacacaagacctgtggaaggctgggcaccagtgctctaaagcaagatctgcctaaactggcaggaacatttttcacagcagacaggagttggtctggattctgtctggggccaggctgagagggaggtgggggcagcagaacgggacaggggcaggggcctatgcagggccaggcactgaagcaaagcccaggcctggaagggcgggctcctgatgtctgctaggaaactcagacagctccctgcctcacccgccatggtttttcctcttccaggatctctcagagctgttgccttcacttttcctgccttggaaagtggagatgataacgaaaagctgttgccaaattaaaggaggctattgcctcctctcccctcctggtccctagcactccaggactcacaaagatgctgctctgaaaaccccaaggcaagcgtggaagagtagaacagctccaggggcagtgggaagatgagggcacccccgcatgttgacagacaccaagggtgggggtggaggagatgaaggggatcagcacaggagtctgggggaaatcctctaaatcccaccctgcaccaacctcacccctgcagctccttgtgtagttacagctctcagctctcagctccttcccaaccacaccccagcccagacctcagggctcctccctctccctaccccctccagagcagcacagtccacagagcccttgaaaaggaattccccctcatctaacagttaattatttcttagtggggagggacagccggtcctctctttccagtgaccccatgtctttgttcaaggcatccagttatactccctgagccagggatctctaggccagctgggacctaacagcttctccagttgctcaggggccagcacttatgcaacctggcatctgtgcctggcacttccttcagatgtctggctgtcctcggagggctggagtccaaggagttggggcaagtaggtggtaaccaggcaaagtttgagttgcaagaagacagggatattggccatcctggtcattgtagtcttatcaggtccttgtcccttgtggaggcagaattcaccacatgttagtttttcctgctgtaatgaacatgaacttggggttggtgcactgatacaataaggtttgctctgctgcagtagtgttgcctccgtgtaagagaaacaaaggcttcaatataacatttgcctgtgtatctcacagcctaagggctaacagagcatctgtgggaacacagtggcccacaccctagtcaggaccccacaaggactgaaccaaatgtagggtcattagcttttcctggcctcaaataggagtctcaccctgccttagccatgactcccatgccatgtacatgtggtaggggcctgtgtgcctagcaaggacacagttcagagagctttcttcattacctagggtgagtggctggaaaaaaaaaaaagttgcccacgcccatgaggccctggagggaagcatagaacctactactaaattcttctgggatgacccatttcaggcatggtttcctctgtatcaaagttgctctctcactgatctactgacagctagctcttaacaaaagagtgtgtggagcagtaaaactcatgtcggcctgagagggccccagacatgtaatgatgtctggtggctttggctggggccaccccatggctgtcctccttcttgggcgttccccgctcccatctcactggagccatggtgggttcacctgtcctctcttctcactcccattcttcagggtgggatgcagtggtgtgctcctctctccccaacagagcactggtgtcccttttggagtctagtttctcttttcacccccaagcctgctggggaggtctcaattccaggaagttggctgctgggcatccactatgggctccagccctggaccacaggcgctgtcatattttgggtggaaaggaatttgtttcttttctgcaaagtaaaggaaaatggaatgagggcaattaggttgatctcatgatgtccatgggtccatgggaacttgaaagactcatccccttccccctgctttaagaagataaatggagaaaaggagctcccattaagggaaaacattgactctattcctattgactctatccttgaaatggaatttggattcaacttcaaaattgaattcatttttagggatagagtcaaattcaaatattgactctatccctgaaattaaatcacaagcaaataagaaatttatgagatccaaactaagccatttaagtaaactattccagaatttaaagctcagcaatgacaagatatcaggaaacagtgacaattctcccactccacaggtgagtccagtgagactggtcagggcttgctgcctgctccttggtgctgtcctggtactttggaagcatctatgattctgtgaacctcacccacagctgcccagcaacttccttttgcttatatgagccagactctgcttttatggcttatactcaaataatttaaggtatttatttatgagttatacgtcccatgtggagatagggaaggagagttaggtactcttcaatgttactacctgctaagcatatatacatgattttttttttttttttttgagacggagtctcactctgtcactcaggctggagtgcagtggcatgattttggctcactgcagcctctgcctactgggttgaagcaattctcttacctcagcctctcaagtagctgaggttacaggcgcccaccatcatgcccagctaatttttgcatttttagtggagacagggtttcaccactttggccaggctagtctcgaactcctgacctcaggtgatccacccgcctcggcctcccaaagtactgggattacaggcgtgagtcatcatgcctggccgaaacgttgctttttaaaggtataattttggattagagcaaatgctagtgtatttaagtaaattccatgaagaatgtgaacactgtaagcaagtgcattattctcagcttccatctcctcacagagccatcatccactctcttccatcctgccccctacactgggaggcaactatgacagacagacgacatggcctgtgctccttcaccatctggcttgtgcttgggtgtggatgataacaggcacctgcaggagatgggagtgtgggaggaggagtaactcagggttttcatttccctcacttactctgggcagctctgtgattctgtaatcacttcaggcctctatctacagccataggcatggcgggctgcccctagtgaaagctacagatttgcctgagttctagaaactgctcccttccttgctctttcaagctcagaaatgcaaaccatttcctgctacagatcatcccagggagcttcagtgccccttgtgactttcttagccctgccagaacctctttaaaacgtgtcttccttctgtgccatatctttcctgccaggacccagaccacagggtgctcccacagaaaaagggacaagaatttatttatgacatggcaataacatatctattcacaatgcgaattcaatttgttttggaagagactgggtcttgttatgttgccgaggttggtctttaactactggcctcaagcaatccctttgccttagccttcccaaagtgctaagattacaggcgtgagtgagtgtgcccaggccttaattcaaaaatttgacttactacaataaaagggaaacaatagaagcattctggaaatggaacaggaaagaaggcagaggtgggaacgatcaatctgtgtcatctgagaagccccatgtgcagaggctgtcctgggtctttaggggacgacaacaacaaagcacacaggatcctggtgtcagggacagagcatggccactgtgggacatagcggctctcctacaaaataatgctcatatacatcccttatgaggaggatcagatcaacatataaaaatatgccagataaagtggaggcgagggcaggatggagagctgccagtatctgcccttgacctccatggacttgaagaaaggctcagcctggagttgtgtgaggcctccgacctggagcagcacccacccctaaagaccaggcaccaatcacaatgcaaggagagatccagacaaataaacaggaaatgaccacagcaggagctttgttgagcacagagcgaggccacacaccactcagcacctggccctccacccgcccttctctccccacctgcccctgccccagcacagcagatcctcagaatccaaaaagagaacctaacctccatgttttattaatggctgataatattttaccacagcttcaaagaaatgatatgagaacaataactaatagagtaagaagtctattcagggtgagtgagtgacaagggaaatctaggagggagatattgtaaccctttcattcccagaaaagaaatgatggtccagggagatacaccaggcctggatattgagattacgtggaaggggttctggggcatcagaggagtgggcctcactcccaccatcctccccttgctatgcttgggaggagatagagctcatcagctgcacagctggggaaagagaagtcagggtcttccaagagacaaggggagctgtgaacaatctgtgtcttgctggtctgcacaaggcagctctcaaacagtggagaacatgctaatgagcagattcagctcagccactctcagccttgacaccctgagcattacagacagcccgtgaccaacccctactttcaaatccaaagatcccctacagcttgaagcttctccccggcctcaactcctgttggtgttgggccccaagggtcatatttcaggaagctgtgagcaccacatcagcatcagggacccggtcaccacctggagaatgataataaaaagacccagcagagcctgcaggagactgtatttgaggcaggaccataggataagtgaggaatgagacggtggctccatcctgtctatttcaggagttagagatgagctgcccctaccgccccttccatgctgctttttattgagtagacccctcctgaagttcttttgaggagagaagaccctgttaggtgccatggtagagaggggccctgtgagtcttaaataactggttaatatagctacttagctgaaattaggaaggtaaacccaggattcaggagaggagaaagagacagcatgggatcctgcagtcaccctcctgtacatctgtttgcagggagggtctttcctgcagggttgggagcacccagtattgaggtcctctgagtatggctaccctgttgttctcatctgtgaatggggccaggcctgtttcttcccccagtataaacagccaggggaatccatccacaaaacacctgctagcttcacattaatcctgtattagtttgatttaatatttcatatcttataagaaatgaaatggaaggatgatctctttggtaaaggtaattcagattcctggggccctggataccttatctcactgtttaaaatcctcatggaggatcaggagagtacagagcccagaaacagtcacgagacctgaagctccctggtgtaaaggaccctcccccgcaccctggggcttagagtgaacagcctctactgtcagcctgattgttctcagtcttcctggctgccaagcttctggttcccagcagcctcctctctcacccttcacctcttctgactggggtcattggccacttgacaggctgtgccctccttgtcagtcagcctgtctacctggtttcctctcagggtgtgtggcttgactgggttaaccatccccagccccagcagaaacagggagaagtgactcagcaaatcccccaagagcagtgggatccctacatgtgagatggggcaaagccatcattctagtccctcccatacctgagaacttcttgcacatcacaagtccaaggaccatagcaggaagtagctctaagccagagacaagaacagagcagtgacaagaggctggtgtgaatggagaccagcaagctctattgagagtagtgggatgaggccacagatgccctgtgttgaggggctagtaggaaatggtgggagactgggatttcattgcactaagaaaggaagaggatggagtgtccgtgggatgtgatggtgaggatgtgccgtaattcccatttgaaaggctcgctctgcctgttgcatgggtgatggacagcaggtgtgagaagcagcaggcagcccagctggaaggcccatctgatttactatcctagagaggattggctctggggtaaagtagtagaggagtgagaagtgattggatttggggtcaaatatttaagatggtgttagcaataagtcaatggagaatcacacatttatttacttaacttaattctacagttcattcccaggagtttacagcaacaaacccatggtaataaatatacatgaattattttaaaacaacaccaaggaaaatataaactttagaatgttaaggctggggtaaagctagaacattgctaggcacgaaggagcatctgaaacatttgctgaaatggtttactgtttacctatccatggatttgttggctcacaattttattgcatcagagcaccatggagaggggtgacagtgcaggtcaccaacccttagttttctgcttcaggaacagttccttgttctacacttagagtcaaagcaaattatgtaactgtaagatgttcaaagatgaagtcaacgaatgcaaagtcagtaactaagtataaaaacctcccccaaggagagtctacatttcttccccagaaatggcctcactgtgcactgctgaagggagagggtcttttcaaagagcccaagaagcaggggctactgggctgcagctctaaatagagatgccattctttctacctgcaggtcctgccaagcctaacagcagacttcagtgatcccacctgaaccaggaattcgggatttttgatgctggttctatttgagccattgtgtaagcttaaaaatgtgacatggagattttgctgtaattgtttctttgctggaatttgacatccacggtgcctctggcttcctctctggtcccaggagggaatggattgtccagcactttttttcagcatctctttgtgggggggggatcaggagatttggagtcaggggcccctccaatctcaccctcttctctaatgcagagtcccttaagctttctggggtgggggcgttggcactctgcggatctcatgaataaaattgttccagctcctgaaataaaggcacaggtgcacataaatacgctgactcttgcatgcagtgccaaggtgaggaagtttcctatgatagatgccgagtttagcactttgactctccattaacattcacacagacacacacacaagcgcgcgcacacacacaaacacacacacacacacacacacacatacagagtcaaagccagcgatgcgggaggggctgacctcaggggcggggtcacaggcatccctcaggtccttctcagtggactttgtctctttttcctggaggtggaggagtctgtacttcatgagaagtcctctgaagaaagcaggagatacttaggagcggggaagtggagacaaaggggagggggcgaggcaaggggggagcacgcaagaaatggggagggggaggaccttatagtggtcagaaaagtcacacgcagaatttggctcttggtttttgtgtttcattaggatggatttagaaaaccagacagagtgcgagataaggagtctaccttgcaaaagacacgtcttagtgtcctcctagtttgaactcatcagtagtagctgggagaagggagccgggacgcctgtgtggggcacgccctctctagttgttcccattctctgcaccccaccggctggtgcccttcaaccccaacaggaaggaaaggaaggaggggtcggaaggctttgggtcttccctcgcgcgccttcttcctctgccatttattccgagtgtccttgccttccctccgctacctgatccccaccttaacaaagcacactctgcgctgttgggccaggattcctcctttggcctctgactcactggtacaatttcgctgcgtcctgtccttaccgcaattgctactgggtagagccggagagagcatcgcccagacccgctagattcatgcagcgccactgcccgcacattcttgacacttctttagatccaaagtcagagcctgagttttcagactagttccgaaagcctttagccattggaaaggggaaatcaatactctaggaacaaaatttgcttcgactttgtctcaacccaaagacaccatgacggcgcagttttcaaagttgctttgagtataaatggaacagggtctcctgtgtcagactcgattttgcgtttccctctttattatagcccttctgtaaattttattacatgtatctctactccactaaaaacatttctgtcaaagacactaagaaagagtcaatgccatgaaaatatgaaggatactcttaaaagagagtttctggtgttgagttttaattaacactttggtatttaaaaatctctaactatttgggtttggggcttagcttcataatgtttcaaactgagatatactcttccttaacctccatacaaattcaggtttatttttatttttaattgcatttatttttctttttttgaaacaatgtctccattcgtcacccaggctggagtgcagtaacacaatcatagctcaatgcagcctcgaactcctggtctcaagcaattctgcctcaccttccagagctgaaattacaggtacaagccaccgggccaagccaaatccaagttaatactgtaatataaaattccaacatttcagagaaagtgaaaatcaccaagttattgtagtccctggagtcactgtcaagactttggtgagggctcagtggctcacgcctgtaatcccagcactctgggaggctgaggcgggtggatcacctgaggtcaggagttcgagaccagcctgtccaacatggcgaaaccccatctctactaaaaacacaaaaaattagatgggtgtggtggcgagtgactgtaattccagctactagggaggctgaggcaggagaatcacttgaaccctggaggtggaggttgcagtgagccaagatcgcaccactgcactccagcctgggcgacaagagcgaaactccgtctcagaaaaaaaaaaaaaaaaaaaaaaaaaggccaggcgcagtggctcacgactgtaatcccagcactttgggaggccgaggcgggcagatcacgaggtcaggagatcgagactaacctggccaacacggtgaaaccccgtctctaccaaaaaaaaaatacaaaaaaatacaaaaaattagtgtggtggcgggcgtctgtagtcccagctactcgggaggctgaggcaggaggatggcgtgaacccaggagaatggcgtgaacccaggaggcggagcttgcagtgagccgagatcgcgccactgcactccagcctgggcgacagagctagactctgtctcaaaaaaaaaaaaaaaaaaaaactttggtgagaaatcttccaggtttttccctacttaaaatatacattatggaagtggtattactggcattataattcagtatatcctcatcttttaataaatggttaaaagtatgagacgcacacatcttctcataacaatacttaaaactgatcttacctcttttatgaccctataaaattgtattgcatagcagttctttggaggacgatggaaatgttctacatcttcattgtggtagtggagatgtgggtgtgtacaacagccaaaacacaacgagctatgcatttcaaatagatacattttagatacatttgattgtatgcaaagcaagtcccaataaaatggcttttaaaatatatcttctttgagatttgtactttgcttatgtaaaacaaaacaaaacaaaaaccttgtttttgtgcccaagagacacaccctgacacatcggcaggtagaggcttacgtgtgtatatatattactgtatatttacagattcagagagagagacagagataaagctatgttaacaatattcatacataccaaaactagataaaaaccaaaaataaaagttagaaataataaaactctatattttaaatgttattctcttcttcaccttttttctcctctttccttcctctctcttcccttttttcttcaacacgctccccccacccccaccccccagccatccttccctactttctcccttctctgcacttgatccccggtgtattccagcctcgaggccaacacacgtcaccgcgtccgcctggggcaggtcggggaagggacgcgaggcggcgctgtcaccgcattctgagggccgcagtgccctgcgcccctgctggtcttgtatcatttcagtgaacgtcgctccagtctttgatggggccacactcgggatgtaaatttaggatcctcactgaaggggcgggaccctgagaggctttctcctggccccttagttgtgagtgttcctgcaggcggaggagccagtttccgtcagaaccgcccagaggcaggcgctgccttcctggggtggcggagcagctggaagcgttttcggatcctggaatccgtgggcggcccgtgggaggggctgaggcgcatttccctactcacccggatccgaatccaccgcggtgctgtttcaagcgagtcagattccacatcgcgctccaccccggactcggaattcctgccccacaggtctgcattttcacagcggcagctgtgagtgccccgcggctggagaccagaagcctgaaggcaactccgtcctccccagcccacagcgccgttattccgtttctatatcagcaaacacttgtagaccagggcggggtgacgggtgatctcagtcctcgcagtgaactccgggccgcaggcttgaaaacgcgcgcgggcgcccagcccaaccccgccctgggttctgtaagcgaccgcactgggtcctttctctttcttttccggacccagcagtggcgcctaaagtctgcgaggaggaagtcgcctctgtgccccggagttcagaggtctaaggcgagtcctgaggaagaaaacgtagttgatggggcagagcagaaggggctggaggtggggtggagggagagggcattggacagaaggcctgggagacttggtgggggacgggcagccaggcctggaccctggggagtgcctcaccccgagcggaagaccatctgggcttcccctagcccagaaagggtggattggcttcacctctgctggccatcacctctacatgccttggaactaaccttgtatattattattattgtcgttatttaagtattaaaagtattttttggggtgagctgaatgagaccctttgctagagctggcacagggaggaaggtcgtcctggagggagggtagacactgtggagggaagggagacctctgtcaggagagctgagaccacctctctgcccctcactactcttgtaatctttaggagtgtaaataatccccctaaggtggggacaggaccccagtccctgctgtgcgcaatagattatgatgatcaaaataaataatcagtgaatgtggatgggaaatctaagtaattgttaaaaccctgtgatgcttaaattttcactcacagaaatgtgtaggctaggagttttaagaggaatggttagtaattataggtatagttcagttttaaaaaatgtttgtaagagtgacaaagatagaatgaacacagttccagatcatggactgttcatcgtgtagtgggggatggtacaagatggtagatgacagctgggcatggtgacactcacctacagtcccaggtactcaggaggctgaagtggctggattgcttgggcccaggcatctgaagctgcagtgagctgtgatcacactgatgccctccaactggcggcagagtgagatctccccctcttaaaaataaataaataaataaatagtagatggagttcaagaatgcaggcaaagttggtacccatcagggaggttcaaaccatgggctagaacagtggttctaaaacttgcctacacattggaagcacgtagagagctttaaaagatattgaagcttaggtccaacctagccttactgattcaattggttttggctgtgacctgggaccgtggatattaaaaactctccaggtggttctgtgaagtggctaggtttgaggaccactggctagatgttccaaagagtaagagacgtgtgtgttggggacgagatgattctttcagtagaaagaggcttttgcatggtgttttattatcgagatataatttatgtgccacgtaatttaccatttaaaaatgtacagtccagggcccactcagaaccatcccagcaacctgaccacagctggtctttgctggacaccatgaaccacactgcccaaaccttcttcattcctgccaacagtggctgccctcccccgccccccaaccccagctatgagatgctcaaggaggagcatgaggtggctgtgctgggggcgccccacaaccctgctcccccaatgtccaccatgatccatatctgcagcgagacctcctgtgtctgactatgttgtctggtccctgtccaacatcctcttcatgaacccccactgcctgggattcatagcattcacctactccctgaagtctagggacaggaagatggttggagacctgactggggcccaggcctatgcctccactgccaagtacctgaacatctgagccctgattgtgtgcatcatcatgaccattctgctcaccatcatcatcctagtgttgatcttccaagtctgtcgatagatcaggaggcatcatccaggccaggagctctgcccatgacctgtattccacatactccaacttccattcctcgtcctggccccagagctgagttctgtatcagccctttatcctcacacacttttctacaatggcattcaataaagtgcaggtgttcctggttaaaaaaaaaaatgtactggtcagtggcttttagcataatcacaacatcgtgccacagtcgctattatctaattgggaagattttctttttttaaaggctagtcaagtaaagcagtgcgagcggagaaggaaaaaagaaatctgtaattggttgtgatcaattagttgtaaacaccgctacactctgaccagcctaattgggaagatttaaggatgtgacacggtctaatgggctcagaggcagaagtgacagtaatctggaagcaggagactgcttaggcagtggcatcccggtgggacagggcaaggagattggggagcccacttttactgcaacactggaaagagggatgtcaccagagaaatgggggtggtgacagacaggaggttgtggcagctgtggcttccatggtagagacctcacgtgtgacattcagcacatggggtgctgtgggggtcttagagcactctgactatagctgggacagtcacagtgtttaggaagcctgtacagtaatctaggctgaatcctgtgcagtgatctaggctgaaagccgagactaaagtagtggctgtgggatcaaaatagggttggaggagctttgagtacttgagaaggaaaagggggaaatcagaaggcaccacggaaagagaaacaggggaggaagagaggatgatgtcatgcgagacgtgtagagtgtccttgtagacctgtcacattggaagctactatggtctcagaggtacagatgtcctaaagcaggctggaaaagggagtctggggagagcttggtgttggagtggacactggcaagctgcctccttggccttttgatcacccaggggctgaatagagaggcagccccgggagacctcacacacttacaggaagtgaccataagaaaggggacctagctttgagtaaaagggaggagaaggagattgtaaagctgaaacgtctaagagatttgtcgtcttagcggatcagctggggcaggtgcttcagaaacagaggtagctgaggtctggaaacaggtctgcaaatctggtcactggccacatagccagtaacgctgtgcgcggctgaggggagtgtgttggaagaataaccaggcctcgtctcttctgtaagtgtgtcctggaaagaacaagcgaatgacagtcagcttgatggggtggctggcgaaacggtcttggtgaggcacgctatcctaggggtgggggtgcggggatggggtggtcgcaatacagggagggcggcagggcccaggtcgtgctcatgcggttggggctgtactctcagctgctcggagccagtccccgcatttggcggcgcttccgcgcgctcccccttttctgggctccaggtcccgccagccaaagttctccaggtctcctgaccgctggaacgttcccttctgagtgtggccccgccctccaagctcgtgattggccctaagctgcgggcgccagttttcattgggtgagcggtcactggggtggggccaggtgacaggaaatttctggtgggccttcgcggctccgctgggttggcagccgcttgagccactgcgaggaaagcaaagtctgggccatggagatgagcctagtcctgctgttcctgatccgcactgccctttttgcaccccagggagctgctgctggtaagtggggttcctggcggtcctcggcggagcggcagcggcggggcgtttctgggggtccgggtgggtagcggcgagcgctgtgcgaccgaggcggggctcaggtgcgctgtcgggggtgcggggagtggacgcggcccgttcccgccacacctcaaccctgcttccacgtctcttttcagtcctcctcgggatcgctcatcactcgccccctgcattttctggtcttgtcctgcactttctctcctctcctctcctccgtctcctctcacttttcggacaaacccgtctttctgaggcccctgggttcctgggctgctcctgtgaatggcattcgagggcccttccagcgcggccgctgaggcagccacctccctcggtgctgggggcggccctaaggtccctgaagccctgtcctctcccggagccgacgtgttctcagctcctgggccgcatctcctggagttggggccctcctttctcgggacccggagctagtgcttcctgctgctgtggggactgtggggctcctgaccctcacgctgaggggttggagtctgcaggctccgggcagaggattcttcctgcgacttctctcatccccagctcattctcccctggcctcccgctgccggggatcctctcttgtcttgcatccttccctgctactattaactccggtgatctaaggacaccagattccctcccacctcctcccctgccctcagggcaccttgggtcctgttgccctcccagctccctgttaccccttcctatctgcagttctctgatacatttctaggatgtcctctgcctcatcccctgcccccgccaccgcaggtccctcctgcctcccttatgggcctttcctagaagcagccttaacccagggctgcccctatgcctcccactcctaactctccctgaccctaactctctggtgccgccttttgtcccagggtcttccctccgtcccactcccctctagaccacccaaggggagccctagtgctaatgttggttgggccttaggcagggcacagggcagggcagatgccccctcccctctagtgcaggtgcctgctctgggccctgcctcacggtggccccttccctactccttcatcctcagccccaccctcttgaggaccccccactccagcccacgggtgctggaccatccctccctggtccctccgcccctctccgccttgggaccttgtgctgctcctacctcttgcccagctgccttgggccctcagcaagttctcatctttcccaagccccaccctcactcagagcaccctcccctcctgtcctcaccctaaccaaagttcccccagggtcacccccacaccatgctcaccccatcctccagtccttgccctgcacatctgtcctcctctacccagacccaacacaggccgtgtgtccaactgcttcttttttttttttttttttttttgagacggcgcctccctctgtcgccaaagttggagtgcagtggcgcggtctcagctcactgcaagctccgcctcccggattcaagtgattcccctgccttagcctcctaagtagctgggattacaagtgcccaccaccacacccagctaatattttgtattttaatagagactgggtttcaccatgttgaccgggatggtctcaatctcctgacctcgtgatctgcctgcctaagcctcccaaagtgctgggattacaggcgtgagccaccacacctagctggtaattcattttttaatttttggaggaatcaacacactgttttccataacaggtgccctattttgtatttccaaatgcattacacaaaggttccagtttcgcaacctgtttgccaaacttgatatttctgtgtgtgtgtgtgtgtgtgtgtgtgtgtgtgtgtgtttgataatagccaaactaattggtgtaaagtaatagttcattgtggttttgatttgcatttccctaatgactgctgatgctgagcatcttttcatgtgtctgttggccatttgtacatcttgtttggggaattggctatgcaagtcctttgcctacttttgtattagttgaatgtctcctgtttgagttgtaggagttctttatgtattctggatattaatctcttatcagatatatatgatttgcaaatattttctttcattctgggggttgctttttcactgtgtttattgtgtttttaatgaacttttttattttgatgagtccaatttatcaattttttctttgtttttgtatctttggtgttatatccaagaaagtgctatcaaattctatggcatgaagataattccctatgttttattgtaagagtttttcagttttagttcttgagtttaggtctttgatgtttttcttagttaattttcatatgtggtgtaagttagggatccaacttcattttttttttttttttggcatgtgaacatctggttttcctagcaccatttgttgaaaagatgcactgactctttaagacccttgccaccagcccaccccaggggacaccaactggtccatccacctccctacttggggcattgccatgccactctgaagcccacaccattgcttctccctgggatatggacctcgtagaaaacgtctctggcaccacagcctacctgcccctcctgcctcacagccaagtctcccttgcccccaccttgtccatgttgagccttcctcaaaggcagtggaccttgcctccatctcacccttacctgtgcaccacagccatggtggtcatgggtccctctgagcctgggtcccttacagtttctgctctcccctctggcaagaccttccttccaccactgccttcatgctcctcccttgaacctgcagggcagccccttccattggcctcctccctataccctgagggggcctgtggctgccctgccctggcacctggcctacaagtttgccatccccattcccccttcttctgttcctcagtcccctcctctatcctcccaccttcccagttttccttgcgtctgaaatcctcattcttgtccctttgcccgtgtgcatttcctgcctcctcaggaaggtcgggacagcagacctgtgtgttaaacattgatgtgaagttacttccaggaagaagtttcatctgtgatttcctcttccccagagccccacagtctttgttacaacctcacggtgctgtcccgggatggatctgtgcagtcagggtttctcgctgagggacatctggatggtcagctcttcctgctctgtgacaggcagaaaggcagggcagggccccggggacagtgggcagaagcagtcctgggagctgagacctgggacacagagactgaagacttgacagagaatgggcaggagctcaggaggaccctggatcatatcaagggccagaaaggaggtgagagtgggcagtgggcaagagtaatgggagaggccttttccaggagagttgggggcagagagcaggacctgtctcttcccactggatttggctgtgagtaggggtgaggaatggtgctcagcggggctcagcccacacagggagggatggaagagggccagggaggggtccttcctggtccgagttcctcacttggactggaatggagaagtcactgctgggtaggggcaggcagccttgcattccctccaggagattagggtttgtgagatcaggaagccagcagcaccaggggctttaggcatttctacacatatgggaagctcttcctctctcccaacctggagactcagtaatggacagtgccccggtcctccagagctcagactttggctatgaatgtcacaaatttctgggaggaaaatgccatgcagaccaagacacactattgccctgtgcaggcagactacatgcaaaagctatggtgttatctgaaattctggaggtatcagaaaaacaggtactgtgaaagtagtgggtcctcctatagaagcctgaacctggggtgggcattaggcaggaaaggaaggcctcaaggccagggctgcctcatctgcctcccagcctgcccatcctggagagctacctcctagccccacgacccaggagcccacccctgacaaccctctcctcagcatcaaagccggagtcccagagtgtgaggccacagtcctgaggcccatcttccagcaagcctaggggaattggaccccaggtaaggaccgatttgcagaaggtctggggtcagtgtgggtttcagcgagagtcagaacaatagagaggaccagtcctgttccctgcatctcccttagaggggagaaaggcttggccacatgcctcactggctctgcccttttgtctccaatgacccccacagtgaatgagatgcacagtggggccttagaaggcaatgtcaccatgatgtgctggcctccatcttctatccctggaatatctctctgacctggcatcaggatgaggcatctttgagccaggatgcccagcagtctaggggtgtcctgcccaatgggaatgggacctaccagacctgcatggccaccaggattccccgaggagaggagcagaggttcacctgctacatgggacacagagggaatcacagcactcaccctgtgccctctggtgagccaggggcaactctcaagggtttcgacctagggaggtcaggccagggtggggatagcagggacggctgtggctttgcgtgctcagtgtgtcacaaggccctttttttagagaaggccctggtgcttcagagtcaatggcagccattctgtatgctgctattgctactgtcattattattattagcagtagtagtagtagtattctctgtgtcctttggtgcaagaagaagacaacatcagctgcagagtccaggtgagaaaacggggcagtggctggagatggaaggactcttctctgggcagcagggtcccctcatagctcctgcacagatagacatgtaggtaacaaggtcctggaacaggggatggacattggggtatttgggaggggaatgggagccacatctccatctacacccctaagtcctgcccaagccagggctgggccacggccctcaaatgtccagcggtggcctcctcctgctgcaggtgaggagtgggcagcagggagggctgtggcacctgctctgtccccatcctggtctctcttgtttcttgggctcaccacggtgcgtccaggtggggtgagttgagaatcacgtgctgattgctgagggcctggatgatcatggcttcagtgggagtaaatagtaaaggcggctgtgatctggggaggagctagaaactggagaggaatccgaggagaggcggtgcccctagtctcttcctctctgcatccctctctcctgtttctccagccatcaggaggacaccaagaaaaagacccacgaagcccagactgggaggcctgcctgtgcagcccctttgaggtccccttgtaacagggggggtcctgagtgcacacagccatctctgtccactttgcagctccccatgggcctcctccaggagctatcttgggggtatcatgtcctctgcatcactggaggttcccaccacatggccctgcctccctgagtttctgtgcagatgttatggaggagtatataagcagacatccctgggccatttgggaagcaggaaccagctccttgtcagggcagctgtggtccctgttttcatcatatgtccaagtgttaccttgtctagcccccaggaacacagtccccaggaccatgttttttggggcacccacagcaggggcagtgcaggtctggttgctcctgctctcacctgcagcatctgccgtagaggaattgtcagttctggttccctgtgggcagtaaaggtttccttgtaggtcactggggcattggccagaaaaaggttgtgaaaatcacatgctaatttctcaaaattcctgctttcaatgttgatgtccaataaagatgttcataatttcagctggatattcttaataggatttcctccaataccgatgctgtaaagtatattgaatggaacaggaattcaaatttgaaactctctctctagaagggtccatgtgggagatggtggctgtggctgtggcaatccccaggtgcagagtgggcggaggcagcctcaggctgaggggtctcaagaaatcccttattccatagggagaagaagaagatcctctgtgggtgtgagggcagtggcctgggtggaatccctgctaggaaccagacaggaaggccttgcagcctcaccaagcagcagccctggggtggagctggatttccagggatgagtggaccaggcaggagcagggcatcccaagtgcaggtcatggacctgggtgtcaagggaagcagagccttcttgagcaagggggtctccagggtcaggtcaggtgcagaccccatggcagccacgtgtttccatcctgggcctgacaggcctgctgggcttcctggtgggctctccaggtaggagctgcctgctcaggactggaaggggaggaacactgagctgtaggtggagggcggaacccacagtgggcagggcctgccctggtgtgcaggtgcttctgcaggaaaggagggcctggggaaagagggagagaaaggccttgtgtgtgacccagcccaggcctggaagtacgtggagccagggcctctctctggggaggcctcccactgtgtccgagctggccaggcttgagaggaggggagggcactgagtttcttctggagtcttgtcatttagtcctgcggccctttcagtccctacagagtgcatagtgggcacagggcgagtgctgatcttcatgaagtcatgggaggggactggcaggggctgggaaaagtgccataggagggagaaaaatgtgggagcatcatcttccctcagagaaagggtaaatctgattttggagtgactgaggagggagaaatcctcagggagtaaaaagcagcactctgcacccaggggagcatttattggtttctctattttctccagagcacgtgagcctgcaaggcccggatcaacgcccggttgggacaggagaccaccagggcagtgcacagctgggatttcagtctctggtgtcaactcctgggtctactggctccactgagggcagctacactctgcagccagatggccagaattcaactccctgcccaggtctcaccagcactttcccacttggtgcctcagtttcctcatctatgaaatggggaaactaacagcatttatttcttgtggttgggtggatgaaaagcgttagtatatatgaggggtttgcagctgtgccacattatttttgttatcatttgattatattttaatatattacatatgcagtcattgtattattattataaatgagatttatgagtgagtgtcctggttacagctccttctggggagcccaggaccagctttcctggcaccttgaggtcccctcaccctgtcacactctcatgcattacctcatatctactatgtcttcataattttatactatagaaatttaccctttaagtagacatttctggtctgtgttttatttcaagtgtctgggaagggatagagtatgaggttcaagagagaaggagaggtctgtcttgatgccttgacacagcacaaagaaatctccccacctcccccgcatctccccaccagttctcggtgatggacgattcacagcaacacagaaagggctgggaagggatggagggggacatctgcagccagtgtttaggggctgaccctgtgggaagacacctgccttgcagaggacctctgcatcttgcagatgcagagctgaagtctgatatgagggagaggacagggagtgctttggactttcctgattaagaagaatagagatcagtctgcttctggggttaagtgaccactggggagattggactgaattaatgaagaataaatgaactgggaatgaggatgagtaaagcaagtatcagcatctcccattatcagttcagactgattggtaagtggggaggtgggatagttcctgaccctgttgtgaggttccttttaactttctggccttggggcacagatgggtggtgctcttcttggtcagggtagcctcagctccactcaggtaaggcagtggtggcagggagagttaggggatcacctgtgaaacggaccaaggcagggatgggagccctctgtgcagcaaaagtggatgcaagccctgcctagaagcaagaggatgaaggaacctagttgggtcctggtccactgcctgcctgtgttcacaggtcaaccagtaaaggaggtggggtagagaattcaatcgtgggctatctatccagagatgtgtttacaggtgtattatttcacatttgtgttcacgtttggtgtcaaaaacacatttatacatgcctgtttcatgtttaagtattttcacattttagttaacccttaaatatcattgttgaatgcggttgtcattagacataaacttgcatattcactgaagcttttgtttttattttaatcaaatttataattgtgcataattgaaagagtcaaatatttgtgcagaatctcttgagaaaaatgagagtcctctctgcctcttctcaatttctgcctttctaggggccaaccactttcaagttttttagctgattcttttgactttacttctgtatctctaactaccatttctttattattattgcttgatttttttcagatgcacccattgttgcacagcgcaatggtggatgcaacagttaagagtacttgttctctttcactcttcccagtatatttatatagtgattatgtttagttcagccatctcttgtttcttttaccatgactaatcctctcatatgtcaactggactacttttcactgcctgtacaacattggttcttcttggagttaatacttgtatttgtttttgtttattttattaactctcattaatttaagtttgatatctcttttgtttgtatgattctttcaagacgttggacactttggacattctgttaattttatcttcttggaaatgtccctcctgggcccttctggctgctcccatctggattggaggcttctccccgtggagcagagtcactgtcctaggatctccctccatcactatctgggaaggtgctttacatgcagtggagccacctgggttccagccaaaatgcagactgattcaacatgtcaaggctgggcctgtgagcctttctgtctagtttcaggaggtgctgattttcctggttcatgggtgatagctggggtagcagggatctctctttttgtctcatagttttctgtatctaaggtaagcgcatactaatatatttttaatgaattcatgtactttttccctaaattagtaacagggctaattagtcttttccttgggccaaaaactacattatgtaaaatttggtatcttaactattttaaagtatacagtagtacagtattaactgtaaatacatagttgtgcaacagatctctagaacttttcatcttgcaacactgaaactctatgcccattgaacaaacattcatccatccccctcaccgagcccctagcagccattagtctactttcagtttagacacctcatataaatggaaatgtgcagtattgggttttctttgtgattggcttattttacttagcagtgtccttcaggttcatccctgttgcagcctgtgaccaggtttccttcttaaggctgaatgatattccgttgtcgatatataccacattttcttcattcatgtgttggtgtgtgttgtcttggctatcgtgaataatgctgctttgaatatgggtatacaatgtttttcttttcaaaccttccctcactttggtggaattaatcctttagtagctacttctgacagcacatatttaaagtatgtttgtatggttcaatttttccattgtttttattctctccaggaagaggagataaatatatgaaggtgctgtttggcacagaatttaatagggaagaaagagacagtataactcaccagtgctgggtctcatcatcctgcaatttcagaacaactatgaatacaaaaagaattttaaaatcccagtcctgcctagaaaggggaagtcatctctaaatatggtggccctggggcagctggcctccctgccaggcctcttccatgggggccctttctgcagtgactgtggtttcttcccattttactctgtcctgtgtcctgactgaagcgacaaggtgtgtctgcagctgtgctcacacctggaggaaacctcaatggtgtgagtaaattgtaaatgtttacttattatgggttattttattatttatggagtatgtattttgatttcattctactgacaacacaataaaccaggacatgatgaccctagcagcacatcctctttcctgtgtcaagaagcatcgtccggggaggtgagaagaagacagtcctccctagaattgaagaaccagggagaagcagatgggctgggcaggtgggttttcacctggaacctggaggatgagcaatgacatctctccaccctgagctcagcctgggcatccacctcctgggctcatgagcagtgcagtggtgcctcctagtggtctctgctcttccttttccagatcaagcacaaacctgagatccaactgtccctcttatgcgcctgggtttcttcactggacaccagtatgagtcaactttcctgtaaagcagaacaagcacgagattggaccatgttagaggaggaatggtgtcatctccacttctggagagatccctgtccccgtgttcgggggaaggaccaagcctcactcccatgcagagaagaggctctgactgtaactgcacctgtggagaggtgaggacctgtcccctctacaccgatggccagagcctccagagtggggccaggtttttccctcagctgtgtcctgtcaggttcatctaggcctcaaagaatagaccctggacattgcctctggcaatgtgagctggacacacacccagatgtaaggtagccctgccaagtatcctggggttgccagtagttctgggtgctcagtgtctggagcggagggtgggaaggaggcttggtgcagaacaagaaccatatgtcacatactattttattctttattagtgtttttgtcataaaaaaccccacgggtaccataaaagataaaagatctaaaaatagtgccctttaatcaaaagtaaacaccctttaaccatcagagagagggagaagtttggcagctgacctagaagccccatcaactgccccagctcaatgataaactcttctcttcttcaaataaaagcacatcctggcttacatggccatcacttctttgtacaattttatatttttatcatctaaaattatagtttagttttacctttaagagtatatttttatcctcatttattccatagattcctgcttgaaatttatattgtctggtagtttcctgtcctttgcattttgcagattgcaccccaaggtgtggtttaatgtatctctatgacctgtattttctgtaaattggtagtttgttatagaggtttgcgtctattcagggttttttttttttttttttttgccatgaggattgatggtactatatcatgtttttcatcaagaggaagaattcaatactagttatttcttttttgcgatgttaattgccattgctgttcagtggctaaatctgttaattcattacaaattgcaaaagtctcagtctttcatttcttttcatatgctagctgcataatttctaaaataaaagatttaccctcttccaccagttatctattcagtagaaacttgttttttgagagactaaaccaagtttctaatcacctatgacccagcaattccactttttgttatataccaatagaaatgcatgcatttgtgtgccaaaatatatgaaaatattatttatagcagcacgatttgtagactctgaatacaacacaaatgtctatcaacagtggagagacaagaagtgtgagctatttataaagctgagcacctgactgccgcgggagtgaatagtgaccacacacagcaagacctgggacatggcagtgactgtgtccagaactgacagaactaatctatcatattagaaatcaagaaagtgtctgctctagggttggggagggtgatttatgaccaagtagaacccagtggtgtttcctggaggctggcaatgctattccttgatgtggctgctatttacctgagtgttcactttgtgaaaatccacggcccacttatggtttgtccacctttctccatgcatgttgtccttcattcaagtatacattactgatgttttgaaacaattctctctaagctaatatagaatctccattactgaaagtccttagaaatgctgcattggaaaaaattagtccaattattaaaaatctatgaaataaatgctgtgactcagacattaagaggagaatctacaacaagagcagtaggcttgggagctaacacaagaacagctttggaaatggctgttgagccaggaactaggaatcaaaacccaaaaaggcccatgcaaggtggagggtgtgaaatgatgccccagtagtgcatgaatgaatgagtcatgggcagtggctcatgggttgcttggtcagtcaggaacttgagcaaaataaagttggaaaactgggggatggaagagagaggtatgcacagacctcttgacatgggcagagcttcagaagatggtggttgcaggtttccccaaatagagaacatcaataaaaaggtagaaattttacaaagagaccagataaaaagtttggagctgaaaagtgcaataactgaaatgaaaaattcactagaggggctccagagcaaatttcaccatgcagaatggagaatcagcaagcttgaagataagacaattgaaattctctagttcagtagcagaaagaaaaaaaattatgaagaaaaataaacagaactttaaagatctgtgagacaacatcaagcacatgcactttgggagtcctcaaagaaaggagagagagaaaggagaagaatgactatttaaagaataactccaaaccttccaaatttgatgaaaaacattattcatccaacaaacttgacaaattttaagcagcaaaaaaatttaaatttaaagaggtccacaccaagagaacattataatcaacctgtcaaaagccaatgacaaacagagcatattgaaatgaataacagagaaggaacttttcaggttcaatggatcctcaataagattgcagcccagttttcttcagaaaccatagagttcagaaggcactggaatgttgacaaatttagaggtcagaaaaaaaaagactgtcatgcaggaattgtgtgtctggaaaaactctccttcagaaataatggattttatatatatataaatatatatatatatatatatatacacacatatatatacatatatatgactatacatagtaccacatatatataactatatatagtactactatgaaattatatatatagtactatatatagtagtcatactataaaagctagtagtaatatgtatatttttggtgtttatatgtgtgtgtgtgtgtgtgtgcatatatatatagtactatatatagtagtcctataaaagctagtagtaacatgtatatttttggtgtttaattcttcctttgtttttcctatttggtttaaaagaaaatgcccattgactaatgaatgaataaacaacatgtagtgtatttctacaatggaatatgatttagccataaaaggaatgaaatactgatacatgctacaacattgctgaatctcaaaaacatgataagtgaaggaaatcagccacaaaaggatacatatttcatgaacccatctttgtgaaatcttcagaagagaccaatctatagagaaagaaagcagacttgtggtgacagggtctggtggcaggaggaaatggagggtgactgcttaatggtgcagagtttcccctgaggtgatgaaatactctggaactagagagtgatgatggctacataacattgtgaacctactaattgtcactgcattgtacacctattgtacaatgggtacagtggtaaattttgtgttcatgtatattgtatcacagtaaaaaagaggctgaagaatagattccaaaatcttttatatggtaaactcctgagtttgcttgagcatctgcccatctgtctttccccctcaggatgtcatctcctactcagagctcacccttgttcttctgtaagtagaaagcctttcttcacaacactcccagatcagccagacccaacccccaaaatgactttctgtcttggatccaaatgctcacgtgcaactctggggcaatttcagtgggagtgaagagattatccaactaggatgattcatttggagggaaatgtttgaccttatgttaggaaagtcatttgctttcctaaaaaggatcctgcttaccagtgagtatataatttttgtatgcccggggtggagttcacagcagaggaactaacaatagctctaggaacaccatacacctcatgcgtagctgactcacccatctgcctcccccagctgaaggaaggagctggattattaccttggcccatccatcaactgcatttcactggatgtgcaccctctacaagtgtgaaccttccagggttctcagttgctcttcctgctgttgtgtggcctccactggtgtggctcatgcccagggggcctgcaggagactgagtgtctcctaattctcaaggccaacattttcagtgagctcaaatgaagattttatgttctcagggactcatattttcatctgtggaagggaaaaatccatctcgctgtcttaggtgtgatggtaattttacataaatatatatatataattatagtatttttatgtctataaatgagataatcagtattttataaattgatggtattcttagcattgacttcattgctcagctaaatgctgtaaccaaaggatgagtcatggagtggaggaagaatatttttctactctctggaggtgccataatcggcatttctgccctatggatttcaaatgagaaatttgctttaggctgaggttggaaggagatctgaacttctttgtattactattattttagatggggtcttgctatgttgtccaagctggagagaagtgactattcacaggtgtgataatagcacacgacagcctcaaaatcctgggctcaagtggttctcccatctcagcctcctgagtagctgggactacaggtgtgcactcagccacttttcattgttattttacttcaaatgctttattttgaatattagaaatgtgaaaatctatttgatcacagaagactttaaaatacacagatcaatgcctacttgaattaaaaaaaaaataaaatacacagaagaaataccacctaggtctcccctcaaaaatatcactgctattgtattgttgaaccttcctggactcagtgtgactgttggtccctggagctgtcctttgcgtggtgctgatttccattttgttggtggtggtttgtttttgtttttgtttttgtttttgtttctgaaacacaatttcactttgtcactgaggctggagtgcagtggtgcgacctcagctcactgcaacctccgcctctcgggttcaagtgatttccatgcctcagcctcctgagtagctgagattacacacatgcgccaccaggcccagcaaattttttgtatttttagtagagacagggttttgccatattggccagtctggtctcgaactcccgacctcaagtgatccacctgcctcagcttctcaaagtgctgggattacaggaatgagccaaggcgcctggcccattttgttgttctctatgtatatatttttataggtatctttattgtacaaggttgcattcatatgttatgggttatcttgaatgttgctttttgaatgtattattatacaagtagttttccatgttgtaaactctgtataaagtttacatgcttttttggccggcatggtggctcacgcctgtaatcccagcactttgggaggccgaggtgggtggatcacttgaggtcaggaattcgagaccagactggccaacatggtgaaaccccatctgtactaaaaaatacaaaaaattagccaggagtctaggcatgtgcctgtagtcccagctactcaggatgctgagccaggagaattgcttgaacccaggaggcagatgttgcagtgagccgagatcactgccactgtactccagcctgggtgacagaatgagactccatctaaaaaaatttttaaatttaaaaagttgacacacttttacaagctgcatcccatctcagataaggaggtgatgtaactgagttcttttagatccatctgctttcatcttatctttttgtaggtaatattttgacaagcatgtttgtacataaagattctcctatggttgggattttaaaaattcatagactactcaggccaggtgcggtgcctcaagcctgtaatctcaacacattggaaggccaaggagggtggattgtctgagcccagaagttcaagaccagcctgggcaacatggcaaaatcctgtctctacaaaaaatacaaaaaaaaaattagctgggcatggtggcatgagcctgtagtcctaggtaccccagtgtttgaggtgggaagattgttcgagcctggaaggttgaggctgaagtgagctgtgatcatgccactgccctccagaccaggctacagagtgagaatttgtctccaaaaataaataaattcatagactactcaagtgataaatattaaacaagagactgctttaaacattttaaagccttattatactgtcatactgtgattgtactgacatatttattcatttaacaaatacttactgagagctatttactgattatgatggtgagaaacaatggtaaggaaacagaccagatccctttatcaaagaacatacatttcagtgatactgactgtaatggttaattttaggtgtcatattgactggattaagggatgcctagatagctggtataacattatttctgggtgtgcctgtgagggtgtttctggaagggattggcatgtgagtgactgagcggggaaaatcctctctcgctgtgggcagccacaatccaatcacctaggggcccagatagaacaaaaaagcagaaaggagtcaaattttctctctctctctctctctcaatctgggacacttttcctgcccttggacatcagaactccaggttgtatggtctttggactcttgagtgttgcaccagtcaaccctttatcctcccacctcctcctctggcccctcaggcctttggccttggactgagccaggctgctgtcttccttggttctccagcttgcaggtggcctctcatggatcttatcagcctccataactatgtgagccatttccactaataaatcccctcttgtctctctatctatctatctatctatctatctatctatctatctatccatctactctattgggtctttctgtcttggtaaccctgatacaccaacagacaataaacaaatagaatctgtcacagtatcagtgataattgccactgataaaaaatacacctaggctagaagattggtgggagtggcgggaatggcagggaatagatttcagaaaaggtaactgggcatgacatttctgagaacttgaccatgggacatttgaacagagactcgaatggtgtgaggagtgagccatgtggacccccggggagcaggtgcatgtgggagtcacagcaggggcaggtagcagagacaggatggagcagtgacaaaaggctggtgtgagtggagatgagtgagctgggctgagaatggcgggatgaggccacaggggtcctatgatgaggggcttgtaggaaacggtgagagactgaggtttcattgtgcctaggaaagaaaagggctgaggtgttcataggatatgtcctaattttcgtttgagaggctcactctgcctttgtgtgagtaatggacagtgggcatgagaggcagcaggcagcccagctggaaagcccttctggtttacaattcttgagagggtggctctcgggtggtggcaggagaggagtgaaaagtgattggatttagtgttgatatacttgttaatattgtggtaaaacatacataccatgtaatttaccttctaaccactttttcagtgtacaattcggtggcctaaagcacatttacaatgttgtgtaaccaccaccaatatgcatttccagaacattttcatcatcccaacagaaactggacccattaaaccaaagctgcccattctccctaccctcaatttctggtaaattctattttactctctgtttctatgaatttgcctattttagctgcatcacataagtgaaatattatatttgtctttttgtttctggctcatttcacttacagtgttctcaaggttcatgcaacctgaatttcattcacttttaaggctgaataatattccatgctatgtgcaccatgggtcgtttatctaatcatcctccgatggacactcggttgcttccaccttttggccattgggaatagtgctgctacgagcatgagtgtacaattatctgtgtgagttcctgctttcaattcttttgggtatatgcccaaaagtggaattgttggctcctatggaaattgtgtttttactttcttgaggaagcatcatactgtttttcatggtcgctgtaccactgtacactctcaccagcagtgtacaagtgttgtgacttctccacatcttcgccaacatttggactagtgaagttcagcatattttcatgtgcctattgcccatttgtatatcttctttggagaattgtctattcatgttgttcactcatttttgaatgagattgtttgtttttctgttgttaagtcatagttctttatgtattctggatattaattctttatcaggtatataactggcaaatatttcctcccattctgtgcattttcttttaactctcttaatagtgtcccttgatatataaaaaaggtttttaaattttgatagtctaatttattgtttttcttttattggttgtgcttttgctcaccagccaagaagccattgccacatccaatgttcctaagattttcttcaatgttttcttctaaaagatttataggttgaactcctaagttgagttccttgaaccattctgagttaattgagttaatttttgaatatggtgtaaggtgatgctatgaattttgtccaacatcattattttgtatgtgggtattaaggtttcctggtactatcagctgaagtggggctgatacacttgtaagatgcagtgagcactgataaatgggaacaccatgcatttatttacttgtctttactccacaggtgattggaggaggcttttggtgacaaacccaaaagaaatgaatacatatgaattcttattaaatcaaaatcaaataaaattataaattttaaaatgttaagagtgaggcaagactagaacatcactagacaggctgaaacatgctgaaatggagggtttactgctttccttgctttaaattttgctggctcacaatggcttatgtttattgcataagggggccacagggagggttgcttgctcacataaggagcccctggttttcttcagaaacaagttcaaattctccacttagagccaaaaaaaattaattgcaagatgttcaaactgaagttggcttctataaagtcaaagaataagcagtaagtgtaaaataaacctcaggaatccaaggaaattctacctttttacctagaaatggcctcacaatgcgtcgctgaagggagagggtcccttccaggaaccccatgatgtaggggtttctgctgcagtcccaaattgagttgtcccttctctctaactgcaggtcccacaagaccttactgcagcttcaataatttcacctggtctaagatttgaggggtttaatgctttttattttgagctgctgtctgggacttagaaaggtgacttgcattttttgtcaaaatattatttctttgatggaatttgacattggtggacactctgccttcctgtgtggttcctacaagggcagatgaccttgcacttctttttggcacttcactagcagtgatagaaggtttgaagttagggcctccctcaatctttaccctctctctaatgcagaggattgcggcctgttggcagaagagtagtgtcttgggccccagctgacctgatgaatatcaatatccaatgccctgtaatgaagtcatgtgtgcacatatcatcacttctgcatgcagtctcatgggaaggtgggttcctggaccccaggttacaggcctaagcactacaggcatacagatggagctccagggaagggagagatgactggggtgggaccacacttttccttcagggtgtccctcagttcaaggaagcttgtactcaagggagagaaagtcctggcaggcctccttacccttggcaatcttggtattggggctggataattatctgttatgtgggtgattgggctgacttgtgcactgcaggatgttcagcatccctggtcattccccacaagatgctggtagcaccttctcctcactccagtcatggcaacaaaacatttttccagacatagctaatgtcctctggtgggaaaattgctcctggatgagaatacttgtttgagaggtagagacactcaggagctgggcctgtagagggaaagtgatccagaagtagatacaaagcagagtggggctggagaagacaggaagggagtctaggtctggaggggcctggcctgatggttgaaggtctggagctcagaacctcagggtatggggaactaaagctcgtgaggaatggggagagtggcagaacctcctattgccagaatatcacactcatacccactaaacacccagcccatggttctgcatctctgggaagtcaggataaatttggctgtatggggtcagtaagagtcctggtaaccctaggctttgtgtgcctcctgatgtgatgaatgtgcggtcacagctcctcctgtaaacattgctgccaaatgtttaacccagagctacataggtccttaggaggcatagcagttagaggaaaaaagttaaaggcatcaggggaactaatatgataaattcagtgtggagaagattccacaggtatttggcctcatctctgaaacaggtaatgccattctaaaagaaaaaagatgggttgattgttatagattgtaggtaattaaagaaacataaccaaaggcaacgagtggacattttaagaaaacaagctataaaaaataggtacaaaaatgtactgaaagaagtggagatatttgaacataaaaggactttaaataatattatggaattatttattttctttggtgtgataatgttggttcttattcttaggaggtgtgtgatgaagtatttagtggtctagtatcatgggtcttgcaacttactttagaatgactcagtcaaaaatcttaatctggacccttttcataagatggtgccaagaacgaagaaggaagctcctgcccctcctaaagccgaagccaaagcgaaggctttgcaaggccaagaaggcagtgttgaaagatgtccacagccacaaaaaaaacaagatccacatgtcacccaccttccggcggcccaagacactgtgactccggaggcagcccaaatatccttggaagagcacccccaggagaaataagcttgaccaccatgttatcatcaagtttccgctgaccactgagtaggctgtgaagaagatagaaaacaacagcctacttgtgttcactgtggatgttaaagccaacaagcaccagatcaaacaggctgtgaagaagtttgtgacattgatgtggccaaagtcaacactctgattcagtctgatggagagaggaaggcatatgttcgactggctcctgactacgatgctttggttgttgccaccaaaattgggatcacctaaactgagtcaagctggctaattccaaatatatgtatatcttttcaccattaaaagaatcttaatctctctattcactctttctcttcacacacacacacacacacacacacatttacgtgcatgctataaaaacatatctacctgtatctataaaaagatatatttttattctttatttttaaaatttatgtatgttcgtgaggcacaagtgcaattctgctacattgatatcttgcttctcagtcccacacaaggaagctgtctcacactatagagaaaatattcatgaacaaattcgtatcagtcacagtgagaggtaacactctaaatagcccatttcatgctcaagacatccaagtcaaagaaacccaatagcacagctgagtcccctctgttcccccccaacaccccactcacatcagggcccctgccctggagtgtcacctttattagctgtgagagacaccccagagccctgggcactgtcagtgattggggtagaacaaaaataggacctggtcagagcccacagatgtggctagaggaactgtggggtgggtgagctccctcataggctcctgaccacaatatcccaacaatctcagggatcagcctccttcatcttacctgcagcctgagagtagctccctctgtttctatctatgggaagaaaatgtcctgtgagaggccagaaaggaggcagggccataaggtcctagagcaaacccctagtctttgatcccagagaagtttccagaaaagtgtaactgtagatccagggcaggatcaagaaatatgaagaaagcagatgtgggtcctggaccaactgccctcctgaggtctgtcatcagcagggaccttcccctgtgatttgtgactgctgggatcaggtcccatcaccaccataatcatcgaagtgaagaatctgtccttcattttcacaggagctttacaaatgagtaggtgctggcacacagggcccaggctgggtagacccatgagtgtggatggtgcttcccagtaatgaggcagggcacacttctacttggggcttgcaacccccagtgggacaagaaaactcagactccactcctcaccccttcctacctgagctcttcttcctccacatcacagcagcgaccacagctccagtgaccacagctccaaggacaacaaggccagcaacgatgcccacgatggggatggtgggctggggagactgctctgggaaaggaagggaaggtgaggggccctgatctccaggcctcagccctgaccctgctgaagagctccagaagggctcctgctttccctgagaaaagacatgacccctcgttcccctctttacccatctccctccttaccccatctcaggatgaggggctggggcagcccctcgtgctgcacatggcatgtgtatctctgttcctctccagaaggcaccaccacagcggcccacttctggaaggttccatcccctgcaggcctggtctccacaagctctgtgtcctgggtctgttcctccccatcccgctgccaggtcagcgtgatctccgcagggtagaagcccagggcccagcacctcagggtggcctcatggtcagagatggggtggtgggcaacgtgtgcctttggaggatctgagaagagtcagaaaattcaggcactttgcactcctcatgggaaaccccagcagcacccatgtgaccaacctgagaatggacaggacacctggggtggggaagggagcacagaacccagacaccagcctggacacagacacctgggaaaatctcctattccttggaaagttcgagtctctgagtggggagcagggacttctggccctgacctaagtggaggccgagggactggaatcagagccccaaacacattgagtgtgaggcagagaacaaaacttgagagaaaagtcacggggcccaaggctgttggagggctcaaaggggaccgcggatcggtattccagggactgtcttccctccattccctcagagatttcatcccttaattgtcccagagagcagggcggactctcacagtcactctctggtaccggatctcgaaagccaggaagattcttcctactcaggactagagggagggcgatatcctagcattgggcccactttcctcccaaccttgtgcgaggccatcccaagagatctacaggagatagggaaggcgcccatggcccctggtacctgcgcgctgtagcgtctccttcccattctccaagtatctgcggagcaactccaggcactcgccctccaggtaggtcctgaactcctctgcatattcctctgcctcatagaagcgctgggtgatctgagccacggtgtccgccgcggtccaggagcgcaggtcctcgttcagggagatgtaatccttgccgtcgtacgcgtgctggtgatacccgcggaggaggcgtccgtcgggccccatgtcgcagccattcattccctggagggtgtgagaccctagccggtccccgcagtcagccccgcccagctagccccgccccctccccgcccaacccgcggggattttggcctaaactgaaaatgaacctcggtaaaggcgcctgggactctcccgggtggagggtctgggcgggtcccgctgcctcggggtagatttcggatccggagactctgggggacccgggcggtccgtggcggatggggggtggtcgtgacctgcgcccccggccgggttcactcaccagcctcgctctggttgtagcggcggagcaggttcctcagggccactcggtcagtctgtgcgttggccttggcgtaccctgtggtccactcccaatactgcggcccctcttgctccacccacggctcccgcggctccatcctcggaatcgcggcgtcgctgtcgaaccgcaggaattgcgtgtcgtctacgtactccacggcgatgtagcggggctccccgcggccgggccgcgacacagcggtgctgaaatacctcaaggagtgggagcctgggggcgaggaggggctgagacccgccagaccctcctccgggcgcggctccctgagtcctgcgcccccaccgggcgggcccctcactcctccccacagaggccgtttctctctggaccccgcactcacccgcccaagtatcggtcagggccagggcccctgagagcagcaggaggaggcttcggggcgccatgaccccaacctccgcgtctgggaaaaatatgagtcccgcggggtgcgtgggactttagaacctgggaactgcggcgacactgattggcttctctagaaacgcgacgcccaatgggagtgagaaatggggccgcgttatgagtatccaggatgaaggacctgacacgggttgggagagaaagagaaactctggggagatggggaattctcaatactgagccttccaaccccagacaccgcctcggggcctgagcccttgagagccactcctggggccctgggactttgccctccccctccccctccccctcctgtgcagggtgtgtctcaatgtctccctgagtcttcgcccgggggctgagaaaccagggagaaaccttcggcatggacccagtccatctcccttcattattcattccgaaatcccagtcccttgattgaactttctgcctcccattccatacctggactccccggactcttttggaagaaaattcaccccaaggagcttggtgccagacaatgaacttgtcctgagaatgaaggtctagagacagtttcttcttcttcctcttcttcttcttcttcttcttcttcttcttcttcttcttcttcttcttcttcttcttcttcttcttcttcttcttcttcttcttcttcttcttcctcttcctcttcctcttcctcttcttcttcttcttcttctttttcttcttcttcttcctcttcctcttcttctccttctccttctccttctccttctcctccttctttcctcctcctcctgctcctccccgcccccctcctcttcttctctggaaaagttgtacctgagcatatgaaataggacagagaccagtttctttctttctttttttttttttattagctgcagtgagtagtagaatcttggtaacccctgaattatcaggaacctttttttttttttttttttttttgagacggagtctctctctgccgcccaggctggagtgcagtggcgcgatctcggctcactgcaagctctgcgtcccgggttcacgccattcttctgcttcagcctcccgagtagctgagactacagatgcccgccaccacgcccggctaatttttttgtagagacgggtttcaccgtgttagccaggatggtctcgatctcctgacctcgtgatcctcccgcctcggcctcccaaagtgctgcgattacaggcatgagccaccgcgcccgaccaatcaggaatcttatgtgtaaaaactgttactttggccccttgatatataaatgtgtctaaatgcattacagttgtacaactctcagagctcctaagttttgctttcccagactatgtatctgtgactcttgttgtattctaaaattaccttcattccatagccctgagtttctgtgggagtccaggacatctcctgacaatacaaagtagcacaacgtgtgattgtatattgcaaccaggagccaatacattcattcacctcaaagttgcaagtgttcaacgcagtcacaatgcccctcaccagtgctcatgcacttcctgtttttaggaagtatccgcatctaagtggtgtgcatgttttattggaacacttagtatttttttaaacctgaaaaaaagcagaaaaagcaattaatttttaggcagtcccacataaggtgttaaaggccaaatgcaaggaacaccctgctaggctctgtagatggatgtattaaaaatttataaaacaatgtgtttaaagctaagaattctgctgctttcaaattctgtccctctgctccttctcctcacctcctgcttctccagcccttccctccgtccctctcatccctcaggccctcctcttcccttagtccccaccactctgtcactcctgaatagtggctctagcactgttccattacctgccacctgagtgttctctccacagtggtcctgctactgtgagtcaaagtgtgtcgtttcttcacctaaaacactccagtggctccacttcggtcttgtgaagcttctagaatgtcaggcacttgagcatatgagggcatacctggttcagcataggcactaaattaatttttgttgactagttgaatgaaatatgattgtataaaaatttaatcgcatcatggaatattataaaatgaaaaatactggaaaaaggaaatattttattttactcatgtagtgtgcttatcaatttataaattcattccatgtgtctgttgagtctgtgtatgacttttgtatgactgcataacaaattaccacaaacactggctttaaacaacacccatttattgtatttatttatttatttttagagacatggtctccctctgttatccacggtgaagtgcagttgcatgatcatggttccctgcaacctcaaactcctggcctctagaggtccccctgcctcagtgtctggagtacctgggactacaggcaagtaccaccgtgctcaggtaaattaaaaaaaaaaaaattcctttttgtagagaggaaggtctcctcaaattgcccaggctagtctcactcctggctgcaagtaatcctcctgtgtcattcccacaaaccttaggattacaggcatgagctaccacgcttgaccaaacaacacttatttatttatttacagttccttagtcagaaatctgagcatgattggagggttctctgtttagggtttcccaaaactgtgttttcattttgagggcctccttcaggcttatacagaggcgacagaattcagtttctgccagttgtaggactaaggttcctgttccttgcctactgtcaaggtagagagaggctgctctcaattcctggtgcccaccagcattctttgccacacagccccttcatttttagaatccacattggaggaaccccctcacactgaatccctctcacactgtgaatctctctgatcaggaagaacccagtcctttcaggggctcgccagatgaggacagcccgaccagggataatccctgtcttaaagtcaattgatttaggaccttaattatatatgcaaaaatcccttcaaggcaggacttacattattgttggttgaataactggggtcaggtgaatgaccaaggttacacgtctatcatgggggggatgatagaatcagcctagcaaggcttgggtctttcttttgagtttaattgggacacaggtggaaattgaagttcaaataaagcaataattgtgaatgataataaaatacatcctatttagccatggaaattcctcttacctcttaaaaccaaatgacatgtttaatattttataattaatttaggttgggtgtggtggtggctcatgcctgtaatcccagcacttttggaggtggagtcaggcagagagcttgatttcatgagttcgagatcagcctaggcagcatggcaaaacccttgtctctaccaaaaatacaaaaattttagccaggcatggtggtgcatgtctgtactcccagctactcagacagctgaggtgggaagatcacatgagcctaggaggtcgaggctgcagtgagctgtcctcctgccacagcactgcagcctgagtgacagagcaagaccctgtctcaataataatgatgataacaataacactaataaatttagagcaaatgaaaattaaagtgcaactattcatcctctcttgtgaagctgtatttttttttactgttacattacaaattactgaaaatgtaacagctcaaagcaacaaatatttatcatctcccacagtttccaatgctcaggaatccaggagaggtttccctgagtgtttctggctcagggcctctcacaaggttgcagtccagttgtcagccagggctgcatcatctgagggctcaactgggctggggatttgcatgaaaaatggctcactcacatggctattggaaaaggcctcagttccttgttgtctggtcccgggaggcctcggtcctagccacatggacctttccacaggtctgcttatgacacagcagctggcttcccccagagttcatgatcccagagacagagagagcaaaggtagaagctacggtaagttttttgttctacaccaacagtcactccatcagatagaagtgaatcattaagtccaggccacactcacagggagggaatgaacctgcacctctgcaaagtggagagtatcaaagaatttgcatatatgttaaaagcaaaattaaaattattgtttcagaattttataaatccaaagctgctttcatctgattataattctttaatgctttaaacttctctttttaaagtaatgattaaaatttgagacatcacagagccttgggtattgaggggaaaaaagtttgagacagagaaaggagatactatagtatctctaagtttttcttgcaaatacctttaataacaatattctctttaatgagttgcaacacagctgagaacttacagtaactagatcaaatagttccaagacttcagtgccataacaatagtgccttaaaaataagtatttgttttgcctaagatgtctcaaatttagtttaagaatgtcccaaatgccaattttctcattcaaatatcatctttaaaaatatttgccaaatcagattgcttttaaggtagaaaaaatgtgaatctcatacctcagccaacacatctagcttagcataatgtcagtaactttggttggatacagtagcccaaaatgcttagctccaacttaggaacaagattttccaaaaactggctactgggtgggcattccataataaacttgacatctttcgctctggtttttaatgagacgtggtagacatgatttggacatcactatgattctaaatagcactgctattctgtacttctacagtattttttaagcaatcctattgtgttttccattcctatttgctattctatcactggttattcctatataattttttcctgtttaatttattttgatcagtaatgtgcatttccaattctgtaaaagtttaattcaggtgtgtgtgtggtagaatgtaacatcgaatcctttgcaagatggaattaccttgcacatcagaccaaacattgtacaccaaaaatctatggagatgtcaatgagccaaggatcaaatgacctatttctggtcaaggccactttcatagcattctggctctctccatcacatggatcattacaattggctttggtccaatgtgaatagttcttggtaagaattattgtaatggcaaaaactgcaattatttttgcatcagcctgtaagagttcaaagtcactgtcttggccgcagaattacaccaggcactttttactcagactctgttaataacttcctgttctttacttgtatcccatacactgtggcattaaacttttaacatacagattcagaaaatgcttccttatatcataaccacatagggttattttatatgttaggaatatttcatgagaagtaggaaaaaatggtgggaaggaaaagaaaaatcaagaagagaataggtggagagaaacgggaaacattatgtatggataatattataaaaatagaaggaaataaatcagatgtagataaccactatggaataatcgaaacataagagaggtttattagctatctgttgctgtgtaacaaactaccccaagacttagtgacttaaaacagtgaacatcaatttactcaaagaaaacaacacaaatactagcaaaactggggcaggtggaagaagttggataaaaaaaaggattttacaaactggaaaagtaagaggtcactggtgtgtaaatggaaatgattttgttggtccatgttctccaagaagcagatgacatgagattaaagttgcagtattttattagaggactcacctgccagaaaatatgggaaaagatccaggaaaccttgggagagacagcagactgagatgcaagcgtgatccccaagtgagggacaggagaggaggtttgttggacacatcctagaccataggcaatctaaggagagttgagcaaggccatagaggagtcctctcgtcacagttggcccttgtcttccagacatgggcctcccttagtgtccctcttgtcacccatcactggttgggaacagcccatggaaagcagggtgcctgcaccaatgctgctgaggatgtcagagcacaggagcagggccttgggagattatctgggagcatggttcaaattttccttcctgaggtttctgggcccttggaaatcaaattccctcaggattggttgctggacaattccactaacacttacaatgggacaaggggaaccaggagacccctcaagtggatcactgggttccacacacattcctcctgccctcattgtgacagcagcccaacctcctcctggagattaggatctattacctgtgcctggagaggaggggactcctcacttgctggtctctgggcacatactgtccaaatctctctgggggcaatagtaatgtgttcttcagtaggctctcatttgtcctgatttaagagtaccttcctttagaatccaggaccttctaccctgcagagcacaggtttgggagatgagaagtgcaaaatcccacagcaggtgaatctaaggaatgagacatggagccatacccactttcactccttagtttctggacccacatgttcttcctactgagaacacggcactgtagagatgtctctgatttaataaatgcaccatgtcctgaaagacagcacccactcctcagagtgcttcctccaggctggcactgagttgtgcctgtagaagacctgtccagcattcttagtggctggcagaccctgggtggtgcagatggtgatagaaccagtggatcccatggccatgaaaatgctgcacctgcttccctgtcaagtgggttccgccaggaagacagtgtgctaagagcaatgccatgcctgtgaatcaggaatgtcaacagtccctggagagtggtgctgactgagggtctgagagcaggacaggaaaacccactcatggaatggtgcctaaccctgtaaagatgaacctctggcccttccagaatggaagtggctcaactaatcacttagcagcgagtgttgctttagtcacctaaagaaatatagccccactgaggcatatcattggcctcaaatgctaatgagttggacattcagaggtggcagcagctggatctgtcttggtaggtggtagtcagtgcttctggacccatatttagcctcatccctgccactgtgcttgctccattcatgaacccatcctgctaggcctgggctgcccgatggtgagggctggctaacttcaatttgtctgcttggttgtttagtgccacttcaggtttggatgttttctggaggtgtcaacataggattcatgctcaatccagatggaccatttctatctcatgatggatgctttggggtctgtccgatctatgactttctgagttacagaagccaattcatatgggcatttgaaatcacatggttgtttgctgtcccatggcaaggattctatcttatcaaggccagtaacataccaaaagttgcttctaacaggggcatatgtctctgctgtggatgacatggccttactccagaatcccaggccgtccatgtgactcccccactggtgcttgtttcagctccatcctgcatctttccccaggactgacacctctaggtgggtctgagggatggcgctgcctcatggcctgaatctgccagtgtcctttcctcagcaggcctaattgaagcaagtcccctcctatttctcctagagtgtaggtcaaaacaatagatgtgggatgtggtattgtcagaactcaaagaggctcaccaggcagtgtgcttccttccttgtagtgaggatgcaagatgcaacactttgtcttttactgtggaggagaaactcctggatgtcctcaaccactggatgaataaaacttcaccacagtggccactcctgaatctctgtatggtttatcttccatcttctggagagcacgtgttttgccaaggccttcagcatactttccacctcctactcatccatcctagtcaacatgatgttgttgatgaaataagctggtttaccattctataggatgccaggttcttcagatctcttttttttttttttttttttttttttttttttttgagacggagtctcgctctgtcgtccaggctggagtgcagtggcgggatctcggctcactgcaagctccgcctcccgggttcacgccattctcctgcctcagcctcccaagttcttca

SEQ ID NO: 22834 - DNA, 2905 bp, Homo Sapiens
gcgcacgtacacacgaagggcctgctgactacatctgccggaaagcatcgggccaagcctttctccattttgcggtctaggaagtagcagaggccccttcctgtagggagttgccatggagacgcggtggggcaccgacggagttctaatgacggccgtgattggtgcaggatcctgctaatctcaggaaggcccgtagagaagtgaggaaaacgtggtggggggcatgcgcgatctggtaggcggtgctgccgtctgttgtacctgagaggcttgcgcatgccgacgcacggattcgaggcggggagcatgggaagaagcggccaggagtatgacctgatcattgcgaccaccgctaggggaagggaggagagggtgtagaaacggggacgagggtgggggaagggcaaggaggcgctcgagctggtgcgcggagcatcctgggagacgtagtccagcgggagggggaagtcgaagactgcgcgtgctcaggagcgcggagcggcccgctgagcgcagaggggcagacactggcctcagatacctgacctggtaccctctatgaggcctgcggtgctgggctccccagaccgagcacccccagaagatgaggggcctgtcatggtgaagctagaggactctgaggaggagggtgaggctgccttatgggacccaggccctgaagctgcacgcctgcgtttccggtgcttccactatgaggaggccacagggccccaagaggccctggcccagctccgagagctgtgtcgccagtggctgcgtccagaggtacgctccaaggagcagatgctggagctgttggtgctggagcagttcctgggcgcactgccccctgagatccaggcccgtgtgcaggggcagcggccaggcagccccgaggaggctgctgccctagtagatgggctgcgccgggagccgggcggaccccggagatgggtcacagtccaggtgcagggccaggaggtcctatcagagaagatggagccctccagtttccagcccctacctgaaactgagcctccaactccagagcctgggcccaagacacctcctaggactatgcaggaatcaccactgggcctgcaggtgaaagaggagtcagaggttacagaggactcagatttcctggagtctgggcctctagctgccacccaggagtctgtacccaccctcctgcctgaggaggcccagagatgtgggaccgtgctggaccagatctttccccacagcaagactgggcctgagggtccctcatggagggagcaccccagggccctgtggcatgaggaagctgggggcatcttctccccagggttcgcgctgcagctaggcagcatctccgcaggtccaggtagtgtaagccctcacctccacgtcccctgggacctcggcatggctggcctttctggccagatccaatcaccctcccgcgaaggtggctttgcgcatgcgcttctgctccccagcgatctgaggagtgaacaggaccccacggacgaggatccctgccggggtgtgggccctgctctgatcaccacccgctggcgctcccccaggggccggagccggggccgccccagcactgggggcggggtggttaggggcggccgttgcgatgtatgtggcaaggtgttcagccaacgcagcaacctgctgaggcaccagaagatccacacgggtgagcgaccattcgtgtgcagcgagtgcggccgcagcttcagccgcagctcgcacctgctgcgccaccagcttacgcacaccgaggagcggccgttcgtgtgcggcgactgtggccagggcttcgtgcgcagcgcgcgcctggaagagcatcggagagtgcacacgggcgaacagcctttccgttgcgctgagtgcggccagagcttccggcagcgctccaatctgctgcagcaccagcgcatccacggcgatcccccgggccctggcgctaagcccccggcccctcctggtgcgcccgagcctcccggcccctttccgtgcagcgagtgccgcgagagcttcgcgcggcgcgccgtgctgctggagcaccaggcggtacacacgggcgacaagtcctttggctgcgtcgagtgcggcgagcgcttcggccgccgctcagtgctgctgcagcaccggcgcgtgcacagtggcgagcggcccttcgcctgtgccgagtgcggccagagcttccggcagcgctccaacctgacgcagcaccggcgcatccacaccggggagcggcccttcgcctgcgccgagtgtggcaaggccttccgccagcggcctacgctcacgcagcatctccgcgtacacacgggcgagaaaccctttgcctgccccgagtgtggccagcgcttcagccagcgcctcaagctcacgcgtcatcagaggacacacaccggcgaaaagccctaccactgcggtgagtgcggcctgggcttcacgcaggtctcgcggctcaccgagcaccagcgcatccacacgggcgaacggcccttcgcctgccccgagtgcggccagagctttcggcagcacgccaacctcacccagcaccggcgcatccacacgggtgaacggccctacgcatgccctgagtgtggcaaggccttccgccagcggcccacgctcacgcagcatctgcgcacccaccgacgagagaagcccttcgcctgccaggactgtggccgccgcttccaccagagcaccaagctcattcagcaccagcgcgtccacagcgccgagtagctccagccgggacgcactgtgtccgccatggtcagaacacctacctcccctggttattgtgaggctggcgattacataagtataagcaggtccgcccagggcttggctactgtaggtgtccaataaacagtagatggaa

SEQ ID NO: 22835 - DNA, 4246 bp, Homo Sapiens
  misc_feature (3300)..(3300): n is a, c, g, or t
atcttttttcatcttctagctgtagctcgggctgcttgtcggcttggctccccctcccccctttgctctctgcctcgtctttccccaggacttcgctattttgcttttttaaaaaaaggcaagaaagaactaaactcccccctccctctcctccagtcgggctgcacctctgccttgcactttgcacagaggtagagagcgcgcgagggagagagaggaaagaaaaaaaataataaagagagccaagcagaagaggaggcgagaagcatgaagtgttaactcccccgtgccaaggcccgcgccgcccggacagacgcccgccgcgccttccagccccgagcggacgccgcgcgccgccctgcctgcagcccgggccggcgacggcgagcccttccttatgcaaagcgcgccagcagcgcgaaggcgggacgccgcgcaccgggccgggctcctccagcttcgccgccgcagccaccaccgccgccaccgcagctcgcggaggatcttcccgagcctgaagccgccggctcggcgcgcaaggaggcgagcgcaaggaggggccggggcgagcgagggagcacattggcgtgagcaggggggagggagggcgggcgcggggggcgcgggcagggcgggggggtgtgtgtgtgagcgcgcttggaggtttcgggccagccaccgccgcgcaagctagaagcgccccagcccggcaagctggctcacccgctggccacccagcacagcccgctggcccctctcctgcagcccatctggcggagcggcggcggcggcggcggcggcaggagaatggcatcagaactggcaatgagcaactccgacctgcccaccagtcccctggccatggaatatgttaatgacttcgatctgatgaagtttgaagtgaaaaaggaaccggtggagaccgaccgcatcatcagccagtgcggccgtctcatcgccgggggctcgctgtcctccacccccatgagcacgccgtgcagctcggtgcccccttcccccagcttctcggcgcccagcccgggctcgggcagcgagcagaaggcgcacctggaagactactactggatgaccggctacccgcagcagctgaaccccgaggcgctgggcttcagccccgaggacgcggtcgaggcgctcatcagcaacagccaccagctccagggcggcttcgatggctacgcgcgcggggcgcagcagctggccgcggcggccggggccggtgccggcgcctccttgggcggcagcggcgaggagatgggccccgcggccgccgtggtgtccgccgtgatcgccgcggccgccgcgcagagcggcgcgggcccgcactaccaccaccaccaccaccacgccgccggccaccaccaccacccgacggccggcgcgcccggcgccgcgggcagcgcggccgcctcggccggtggcgctgggggcgcgggcggcggtggcccggccagcgctgggggcggcggcggcggcggcggcggcggaggcggcgggggcgcggcgggggcggggggcgccctgcacccgcaccacgccgccggcggcctgcacttcgacgaccgcttctccgacgagcagctggtgaccatgtctgtgcgcgagctgaaccggcagctgcgcggggtcagcaaggaggaggtgatccggctgaagcagaagaggcggaccctgaaaaaccgcggctatgcccagtcctgccgcttcaagagggtgcagcagagacacgtcctggagtcggagaagaaccagctgctgcagcaagtcgaccacctcaagcaggagatctccaggctggtgcgcgagagggacgcgtacaaggagaaatacgagaagttggtgagcagcggcttccgagaaaacggctcgagcagcgacaacccgtcctctcccgagtttttcatgtgagtctgacacgcgattccagctagccaccctgataagtgctccgcgggggtccggctcgggtgtgggcttgctagttctagagccatgctcgccaccacctcaccacccccacccccaccgagtttggcccccttggccccctacacacacacaaacccgcacgcacacaccacacacacacacacacacacacacacacaccccacaccctgctcgagtttgtggtggtggtggctgttttaaactggggagggaatgggtgtctggctcatggattgccaatctgaaattctccataacttgctagcttgttttttttttttttttttacacccccccgccccaccccccggacttgcacaatgttcaatgatctcagcagagttcttcatgtgaaacgttgatcacctttgaagcctgcatcattcacatattttttcttcttcttccccttcagttcatgaactggtgttcattttctgtgtgtgtgtgtgttttattttgtttggatttttttttttaattttacttttagagcttgctgtgcttgcccacctcttttccaacctccaccctcactccttctcaacccatctcttccgagatgaaagaaaaaaaaaagcaaagtttttttttcttctcctgagttcttcagtgagattgagcttgcaaaggaaaaaaaaatgtgaaatgttatagacttgcagcgtgccgagttccatcgggttttttttttagcattgttatgctaaaatagagaaaaaaatcctcatgaaccttccacaatcaagcctgcatcaaccttctgggtgtgacttgtgagttttggccttgtgatgccaaatctgagagtttagtctgccattaaaaaaactcattctcatctcatgcattattatgcttgctactttgtcttagcaacaatgaactataactgtttcaaagactttatggaaaagagacattatattaataaaaaaaaaagcctgcatgctggacatatatggtataattattttttcctttttttttccttttggcttggaaatggacgttcgaagacttatagcatggcattcatacttttgttttattgcctcatgacttttttgagtttagaacaaaacagtgcaaccgtagagccttcttcccatgaaattttgcatctgctccaaaactgctttgagttactcagaacttcaacctcccaatgcactgaaggcattccttgtcaaagataccagaatgggttacacatttaacctggcaaacattgaagaactcttaatgttttctttttaataagaatgacgcccactttggggactaaaattgtgctattgccgagaagcagtctaaaatttatttttnaaaaagagaaactgccccattatttttggtttgttttatttttattttatattttttggcttttggtcattgtcaaatgtggaatgctctgggtttctagtatataatttaattctagtgtttataatctgttagcccagttaaaatgtatgctacagataaaggaatgttatagataaatttgaaagagttaggtctgtttagctgtagattttttaaacgattgatgcactaaattgtttactattgtgatgttaaggggggtagagtttgcaaggggactgtttaaaaaaagtagcttatacagcatgtgcttgcaacttaaatataagttgggtatgtgtagtctttgctataccactgactgtattgaaaaccaaagtattaagaggggaaacgcccctgtttatatctgtaggggtattttacattcaaaaatgtatgtttttttttcttttcaaaattaaagtatttgggactgaattgcactaagatataacctgcaagcatataatacaaaaaaaaattgcaaaactgtttagaacgctaataaaatttatgcagttataaaaatggcattactgcacagttttaagatgatgcagatttttttacagttgtattgtggtgcagaactggattttctgtaacttaaaaaaaatccacagttttaaaggcaataatcagtaaatgttattttcagggactacatcctgtctttaaaaagaaatgaaaagtaaatcttaccacaataaatataaaaaaatcttgtcagttacttttcttttacatattttgctgtgcaaaattgttttatatcttgagttactaactaaccacgcgtgttgttcctatgtgcttttctttcattttcaattctggttatatcaagaaaagataatctacaataataaacggcatttttttttgattctgtaaaaaaaaa

SEQ ID NO: 22836 - DNA, 2395 bp, Homo Sapiens
tcggagaccacattgcctcgtgtccaactatccattaccaagaagaaatctattcgtttgagcctgagacactctttgaggtaaaaaattagaatgaaagaacctttggatggtgaatgtggcaaagcagtggtaccacagcaggagcttctggacaaaattaaagaagaaccagacaatgctcaagagtatggatgtgtccaacagccaaaaactcaagaaagtaaattgaaaattggtggtgtgtcttcagttaatgagagacctattgcccagcagttgaacccaggctttcagctttcttttgcatcatctggcccaagtgtgttgcttccttcagttccagctgttgctattaaggttttttgttctggttgtaaaaaaatgctttataagggccaaactgcatatcataagacaggatctactcagctcttctgctccacacgatgcatcaccagacattcttcacctgcctgcctgccacctcctcccaagaaaacctgcacaaactgctcgaaagacattttaaatcctaaggatgtgatcacaactcgctttgagaattcctatcctagcaaagatttctgcagccaatcatgcttgtcatcttatgagctaaagaaaaaacctgttgttaccatatataccaaaagcatttcaactaagtgcagtatgtgtcagaagaatgctgatactcgatttgaagttaaatatcaaaatgtggtacatggtctttgtagtgatgcctgtttttcaaaatttcactctacaaacaacctcaccatgaactgttgtgagaactgtgggagctattgctatagtagctctggtccttgccaatcccagaaggtttttagttcaacaagtgtcacggcatacaagcagaattctgcccaaattcctccatatgccctggggaagtcattgaggccctcagctgaaatgattgagactacaaatgattcaggaaaaacagagcttttctgctctattaattgcttatctgcttacagagttaagactgttacttcttcaggtgtccaggtttcatgtcatagttgtaaaacctcagcaatccctcagtatcacctagccatgtcaaatggaactatatacagcttctgcagctccagttgtgtggttgctttccagaatgtatttagcaagccaaaaggaacaaactcttcggcggtgcccctgtctcagggccaagtggttgtaagcccgccctcctccaggtcagcagtgtcaataggaggaggtaacacctctgccgtttcccccagctccatccgtggctctgctgcagccagcctccaacctcttggtgaacaatcccagcaagttgctttaacccatacagttgttaaactcaagtgtcagcactgtaaccatctatttgccacaaaaccagaacttcttttttacaagggtaaaatgtttctgttttgtggcaagaattgctctgatgaatacaagaagaaaaataaagttgtggcaatgtgtgactactgtaaactgcagaaaattataaaggagactgtgcgattctcaggggttgataagccattctgtagtgaagtttgcaaattcctctctgcccgtgactttggagaacgatggggaaactactgtaagatgtgcagctactgttcacagacatccccaaatttggtagaaaatcgattggagggcaagttagaagagttttgttgtgaagattgtatgtccaaatttacagttctgttttatcagatggccaagtgtgatggttgtaaacgacagggtaaactaagcgagtccataaagtggcgaggcaacattaaacatttctgtaacctattttgtgtcttggagttttgtcatcagcaaattatgaatgactgtcttccacaaaataaagtaaatatttctaaagcaaaaactgctgtgacggagctcccttctgcaaggacagatacaacaccagttataaccagtgtgatgtcattggcaaaaatacctgctaccttatctacagggaacactaacagtgttttaaaaggtgcagttactaaagaggcagcaaagatcattcaagatgaaagtacacaggaagatgctatgaaatttccatcttcccaatcttcccagccttccaggcttttaaagaacaaaggcatatcatgcaaacccgtcacacagaccaaggccacttcttgcaaaccacatacacagcacaaagaatgtcagacagaatgccctgttcgtgcagtttgctgaggtgttcccgctgaagtatttggctaccagccagatcccctgaactaccaaatagctgtgggctttctggaactgctggctgggttgctgctggtcatgggcccaccgatgctgcaagagatcagtaact

SEQ ID NO: 22837 - DNA, 526 bp, Homo Sapiens
tggttcctgccgtccggactctttttcctctactgagattcatctgtgtgaaatatgagttggcgaggaagatcgacctattattggcctagaccaaggcgctatgtacagcctcctgaaatgattgggcctatgcggcccgagcagttcagtgatgaagtggaaccagcaacacctgaagaaggggaaccagcaactcaacgtcaggatcctgcagctgctcaggagggagaggatgagggagcatctgcaggtcaagggccgaagcctgaagctcatagccaggaacagggtcacccacagactgggtgtgagtgtgaagatggtcctgatgggcaggagatggacccgccaaatccagaggaggtgaaaacgcctgaagaaggtgaaaagcaatcacagtgttaaaagaaggcacgttgaaatgatgcaggctgctcctatgttggaaatttgttcattaaaattctcccaataaagctttacagccttctgcaaagaaaaaaaaaaaaaaaaaaaaaaaaaa

SEQ ID NO: 22838 - DNA, 5423 bp, Homo Sapiens
cccgggccaccgcctccgcccggctgcccgcccggactgtcgcggcccgcggtggcgacggcggccgctgcaaagtttccccggcggcggcggcccgggggcgcatcctcccgcaactgtcaagcgctggcggcggaaatgatgaggcgctggccattttccgagcccgggtttcctgcctgagccccgctcgagcgagccgcgagcgaggagccggcgggcgggagaggacgcgcccagggcgggggcccgcccgccccctcgggatttcgagggcccgggggcgcgcgacgccatgggccggccgggcccagagctcctgtctctcagcccggccgcaccacctgggtctccgccatgaacgggcctgccctgcagccctcctcgccctcttccgcgccctcagcctccccggcggcggccccgcggggctggagcgagttctgtgagttgcacgccgtagcggcggcccgggagctggcccgccagtactggctgttcgcccgggagcatccgcagcacgcgccgctgcgcgccgagctggtgtcgctgcagttcaccgacctcttccagcgctacttctgccgcgaggtgcgcgacggacgggcgccgggccgcgactaccgggacacaggccgtgggcccccagccaaggccgaggcgtccccggagccaggccccggccccgccgcccctggcctgcccaaggcccgcagctctgaggagctggccccgccgcggccgcccgggccctgctccttccagcactttcgccgcagcctccgccacatcttccgccgccgctcggccggggagctgccagcggcccacaccgctgccgcccccgggacccccggagaggctgctgagacccccgcccggcctggcctggccaagaagttcctgccctggagcctggcccgggagccgccacccgaggcgctgaaggaggcggtgctgcgctacagcctggccgacgaggcctccatggacagcggggcacgctggcagcgcgggaggctggcgctgcgccgggccccgggccccgatggccccgaccgcgtgctggagctcttcgacccacccaagagttcaaggcccaagctacaagcagcttgctccagcatccaggaggtccggtggtgcacacggcttgagatgcctgacaacctttacacctttgtgctgaaggtgaaggaccggacagacatcatctttgaggtgggagacgagcagcagctgaattcatggatggctgagctctcggagtgcacaggccgagggctggagagcacagaagcagagatgcatattccctcagccctagagcctagcacgtccagctccccaaggggcagcacagattcccttaaccaaggtgcttctcctggggggctgctggacccggcctgccagaagacggaccatttcctgtcctgctacccctggttccacggccccatctccagagtgaaagcagctcagctggttcagctgcagggccctgatgctcatggagtgttcctggtgcggcagagcgagacgcggcgtggggaatacgtgctcactttcaactttcaggggatagccaagcacctgcgcctgtcgctgacagagcggggccagtgccgtgtgcagcacctccactttccctcggtcgtggacatgctccaccacttccagcgctcgcccatcccactcgagtgcggcgccgcctgtgatgtccggctctccagctacgtggtagtcgtctcccaaccaccaggttcctgcaacacggtcctcttccctttctcccttcctcactgggattcagagtcccttcctcactggggttcagagttgggccttccccaccttagttcttctggctgtccccgggggctcagcccagagggtctcccagggcgatcctcaccccccgagcagatcttccacctggtgccttcgcccgaagaactggccaacagcctgcagcacctggagcatgagcctgtgaatcgagcccgggactcggactacgaaatggactcatcctcccggagccacctgcgggccatagacaatcagtacacacctctctgaccagtgaggaattccaggcctcaacagctgcccttgaggagcacaggcagaagtgtgaacttgtgaatgtaattgatctttccttccttccagagaaagatttaagggacactgttaactgctcgtgccagtttggaagtgacccttctattaggcctgttgaagggccctcctgtaggtttcatctatccacctggctttctccttattgtttacagatgtagttcttgttagaggatgccgctagctcctgcccggggtccctatgcccagtccccgttactcttagagaaaggagttggggtgagggccagagctggcagtggaaacttgttctctttttcactgacactgtcacagcggatgacagactttctacggggaggagggggggatcatcaggaagcccagaacactaacaagcggttctcccatctaccgtcagtccacatggcaggtctgctgtgtccacaccacagatgaccacatctaatcctgcttctactctcagctttaggacaaaagctctgtcagaggcacaagctgaaggtcaaaaatgatttaaaacattttacctcagactaatttctttaaaggattcaggttcaaaacttaaccactgcttatttcagtgcactgtttcaactaacacccatgctatttttgtagtcagaaacagctatgcaaaccctacctaatttacagtctgagccagcatgctggcttgtctactgcatcctcgggacagtcacctgccactgagtggccactgtccttcctaaatgtcaagaagtgaagtatgtcaccctttcagggaaattcaggcaattactgaaataggaaggtggcaagaacagttctatcctggtgccttacgaataaaaaactggattctggtttacagcagctttacagtgatagttaaattaactggggctaggggaaaagcaaccaaaaagggaaaaaggactcctaggccctttctattaaatccttcagcaacaaggctggcttggtgccctccaagcatctaatggcttattaaattatcccacaattgggttttaggctccttttttgacccaaaatggaagctgggaatctggtgccataactaatgagaaactcctttaataccccacaatcagtgttctgttctacctggctactgcttcactggattgaaaatctatctatctccttgcacacatgggcacacacaatctccaccatccagggaggtcctgaattcaaatctctatctatccaagtgatacaattcatagggggctggctcctcccagaacctgtctggaggctcagaaacgggggcagtgacagtggagtcagctgctcttgggtgccagcagagccattcagtacaacccccaggctcacagcagtggcttctaggaaactgggagtttagatcagctttacagatacatcgatcagaggctaaaatgaaacctcagcctaaaactcataggactgactgcctgggaggagggttaggtctgcttcttccacttatacttagtctctgtgctccaagaggtcaaatttttgcttctagaatttccttggggtctttcagagggtgggggaacaaacccctatgcacttttcttttttttttttgagatggagtttctcttgtcaaccgggctggagtgcagtggtgcaatcttggctcactgcaacctccaccttcctggttcaagcgattctgcctcgacctctcaagtagctgggattacaagcaccagccaccatgcctggctaattttgtatttttagtagagacagggtttcaccatgttggccaggctggtctcgaatgtctgacctcaggtgatccacccgccttggcctcccaaagtgctgggattacaggcgcgagccaccgcgcccagcctacaccacttttagtaccaacactcttgggtgatttcatggaccctaaagcagacctgacactgatccagatttgcagtccatttttaaggacacctgtctttatttcctcaaagtcaagcagctttctctggaaaatgaatgctaattagtgtgaaccaaaagagtaagtaagagtctgaagtttttttaaaggagaaagcttattatggaaagtcactggtcctcccctccgcacaggaaaggtacccagtagataatgaaccaaattaagttccctccctccagccagaagttaaacatctgggatatgacgtcttcatgccaggggcactcatttcttagcagcctctctacatacatctctcaggtggtgccaagaggcacaccaggtagagcaaacttagcagctctgactaacaggctgcaaagtgcaagttcagattctgtggcagagatttggagggcacccacgtccagactgcttcccgtccaagttaccaggacagctcaaaaacatgctgacagaaaactcccatggctctaggaaaaagtgacactaagccaacacctttctttatgtgggagcaaaatcagctgatgaaggggtgggcaccattgtggggcaggcaccccactggctgcagctagcccaccataggcacagcacatcccaccactctccttccagtcctgaccaggccccagccggcaacttctaccgagagccatggctcaacaccaaactggacagtagacatcatgatccctccagttagctctaattacagaccccaccagtacagcttgacagctcccggcaccatcccttccttcatctgacttattgaacttttacaaactaacagtcaccagcaccaaagaattaagtcaactaacctgccttgaattttaaaccagcaatccatatggctttatctggtataaatcttctgcctttgatcatttctggaccgtaggaaaaaggaatagcaatcattaaaatcttgggccagagaacactatttttacataacagtttcttaacctaaagtcaaggccttggactcttccctgagggttgcctgaaattccttcatgctttctattcaggactaattcccttactgcaaatgtgttagctctaacatctcccacaagctaaaggaacttgcaagtatattaacaaggacacatctgacatcctgtgtttggttaaaatatacagcacattgtgataacataaagtggatccatcttgtatcattataggcaaaaggtatttggcaaatttttatgtatggttttatgtactgtacaagtaacttattcttgaataatgcaaattttgctataatgtacaaattgctatatgtgaattaaaaagtttccaaaatcttgaaaaaaaaaaaaaaaaaaaa

SEQ ID NO: 22839 - DNA, 1125 bp, Homo Sapiens
cccccatgtgacagtgacggggtccccgctccaggagacgctcgagtctgcgtcccggccctcagcactgtccactgtttcggtgccagcagagaccagcaggcccgggacagttggtgtttggccgtgccgctgtctaacttggtgtgcagagtgaattgccgctgccggagcggagagaggcggagcggccaggagagaggggatttctgtcagcgccggcctcgggagctcggagacatgaacggcttcacgcctgacgagatgagccgcggcggggatgcggccgccgcagtggccgcagtggtcgctgccgcggccgccgccgcctcggcggggaacgggaccggcgcgggcaccggggctgaggtgccgggcgcgggggcggtctcagcggctgggcccccgggggcggccgggccgggccccgggcaactgtgctgcctgcgggaggatggtgagcggtgcggccgggcggcaggcaacgccagcttcagcaagaggatccagaagagcatctcccagaagaaggtgaagatcgagctggataagagcgcaaggcatctttacatatgtgattatcataaaaacttaattcagagtgttcgaaacagaagaaagagaaaagggagtgatgatgatggaggtgattcacctgttcaagatattgataccccagaggttgatttataccaattacaagtaaatacacttaggagatacaaaagacacttcaagctaccaaccagaccaggacttaataaagcacaacttgttgagatagttggttgccactttaggtctattccagtgaatgaaaaagacaccttaacatatttcatctactcagtgaagaatgacaagaacaaatcagatctcaaggttgatagtggtgttcactaggagacgtggaattgagactaataacttggatgttaacactgtttactgttttttcacatgtagaaatgttctttgtgtattttttctacagaggattttctctgattttattttctttgtttctgactctaataattagttggaaactcatataaaatgagctttcctaaattaaatctattttaaataaaggttattactattaaaaaaaaaaaaaaaaaa

SEQ ID NO: 22840 - DNA, 5008 bp, Homo Sapiens
cggacaggcgcacacgacgcctcgagcacccttctcttcttgccgccggggacttcagattgatccttcccgggaagagtagggactgctggtgccctgcgtcccgggatcccgagccaacttgtttcctccgttagtggtggggaagggcttatccttttgtggcggatctagcttctcctcgccttcaggatgaaagctcagggggaaaccgaggagtcagaaaagctgagtaagatgagttctctcctggaacggctccatgcaaaatttaaccaaaatagaccctggagtgaaaccattaagcttgtgcgtcaagtcatggagaagagggttgtgatgagttctggagggcatcaacatttggtcagctgtttggagacattgcagaaggctctcaaagtaacatctttaccagcaatgactgatcgtttggagtccatagcaagacagaatggactgggctctcatctcagtgccagtggcactgaatgttacatcacgtcagatatgttctatgtggaagtgcagttagatcctgcaggacagctttgtgatgtaaaagtggctcaccatggggagaatcctgtgagctgtccggagcttgtacagcagctaagggaaaaaaattttgatgaattttctaagcaccttaagggccttgttaatctgtataaccttccaggggacaacaaactgaagactaaaatgtacttggctctccaatccttagaacaagatctttctaaaatggcaattatgtactggaaagcaactaatgctggtcccttggataagattcttcatggaagtgttggctatctcacaccaaggagtgggggtcatttaatgaacctgaagtactatgtctctccttctgacctactggatgacaagactgcatctcccatcattttgcatgagaataatgtttctcgatctttgggcatgaatgcatcagtgacaattgaaggaacatctgctgtgtacaaactcccaattgcaccattaattatggggtcacatccagttgacaataaatggaccccttccttctcctcaatcaccagtgccaacagtgttgatcttcctgcctgtttcttcttgaaatttccccagccaatcccagtatctagagcatttgttcagaaactgcagaactgcacaggaattccattgtttgaaactcaaccaacttatgcacccctgtatgaactgatcactcagtttgagctatcaaaggaccctgaccccatacctttgaatcacaacatgagattttatgctgctcttcctggtcagcagcactgctatttcctcaacaaggatgctcctcttccagatggccgaagtctacagggaacccttgttagcaaaatcacctttcagcaccctggccgagttcctcttatcctaaatctgatcagacaccaagtggcctataacaccctcattggaagctgtgtcaaaagaactattctgaaagaagattctcctgggcttctccaatttgaagtgtgtcctctctcagagtctcgtttcagcgtatcttttcagcaccctgtgaatgactccctggtgtgtgtggtaatggatgtgcaggactcaacacatgtgagctgtaaactctacaaagggctgtcggatgcactgatctgcacagatgacttcattgccaaagttgttcaaagatgtatgtccatccctgtgacgatgagggctattcggaggaaagctgaaaccattcaagccgacaccccagcactgtccctcattgcagagacagttgaagacatggtgaaaaagaacctgcccccgctagcaggcccagggtatggcatgaccacaggcaacaacccaatgagtggtaccactacaccaaccaacacctttccggggggtcccattaccaccttgtttaatatgagcatgagcatcaaagatcggcatgagtcggtgggccatggggaggacttcagcaaggtgtctcagaacccaattcttaccagtttgttgcaaatcacagggaacggggggtctaccattggctcgagtccgacccctcctcatcacacgccgccacctgtctcttcgatggccggcaacaccaagaaccacccgatgctcatgaaccttcttaaagataatcctgcccaggatttctcaaccctttatggaagcagccctttagaaaggcagaactcctcttccggctcaccccgcatggaaatatgctcggggagcaacaagaccaagaaaaagaagtcatcaagattaccacctgagaaaccaaagcaccagactgaagatgactttcagagggagctattttcaatggatgttgactcacagaagcctatctttgatgtcaacatgacagctgacacactggatacgccacacatcactccagctccaagccagtgtagcactcccccaacaacttacccacaaccagtacctcacccccaacccagtattcaaaggatggtccgactatccagttcagacagcattggcccagatgtaactgacatcctttcagacattgcagaagaagcttctaaacttcccagcactagtgatgattgcccagccattggcacccctcttcgagattcttcaagctctgggcattctcagagtaccctgtttgactctgatgtctttcaaactaacaataatgaaaatccatacactgatccagctgatcttattgcagatgctgctggaagccccagtagtgactctcctaccaatcatttttttcatgatggagtagatttcaatcctgatttattgaacagccagagccaaagtggttttggagaagaatattttgatgaaagcagccaaagtggggataatgatgatttcaaaggatttgcatctcaggcactaaatactttgggggtgccaatgcttggaggtgataatggggagaccaagtttaagggcaataaccaagccgacacagttgatttcagtattatttcagtagccggcaaagctttagctcctgcagatcttatggagcatcacagtggtagtcagggtcctttactgaccactggggacttagggaaagaaaagactcaaaagagggtaaaggaaggcaatggcaccagtaatagtactctctcggggcccggattagacagcaaaccagggaagcgcagtcggaccccttctaatgatgggaaaagcaaagataagcctccaaagcggaagaaggcagacactgagggaaagtctccatctcatagttcttctaacagaccttttaccccacctaccagtacaggtggatctaaatcgccaggcagtgcaggaagatctcagactcccccaggtgttgccacaccacccattcccaaaatcactattcagattcctaagggaacagtgatggtgggcaagccttcctctcacagtcagtataccagcagtggttctgtgtcttcctcaggcagcaaaagccaccatagccattcttcctcctcttcctcatctgcttccacctcagggaagatgaaaagcagtaaatcagaaggttcatcaagttccaagttaagtagcagtatgtattctagccaggggtcttctggatctagccagtccaaaaattcatcccagtctggggggaagccaggctcctctcccataaccaagcatggactgagcagtggctctagcagcaccaagatgaaacctcaaggaaagccatcatcacttatgaatccttctttaagtaaaccaaacatatccccttctcattcaaggccacctggaggctctgacaagcttgcctctccaatgaagcctgttcctggaactcctccatcctctaaagccaagtcccctatcagttcaggttctggtggttctcatatgtctggaactagttcaagctctggcatgaagtcatcttcagggttaggatcctcaggctcgttgtcccagaaaactcccccatcatctaattcctgtacggcatcttcctcctccttttcctcaagtggctcttccatgtcatcctctcagaaccagcatgggagttctaaaggaaaatctcccagcagaaacaagaagccgtccttgacagctgtcatagataaactgaagcatggggttgtcaccagtggccctgggggtgaagacccactggacggccagatgggggtgagcacaaattcttccagccatcctatgtcctccaaacataacatgtcaggaggagagtttcagggcaagcgtgagaaaagtgataaagacaaatcaaaggtttccacctccgggagttcagtggattcttctaagaagacctcagagtcaaaaaatgtggggagcacaagtgtggcaaaaattatcatcagtaagcatgatggaggctcccctagcattaaagccaaagtgactttgcagaaacctggggaaagtagtggagaagggcttaggcctcaaatggcttcttctaaaaactatggctctccactcatcagtggttccactccaaagcatgagcgtggctctcccagccatagtaagtcaccagcatataccccccagaatctggacagtgaaagtgagtcaggctcctccatagcagagaaatcttatcagaatagtcccagctcagacgatggtatccgaccacttccagaatacagcacagagaaacataagaagcacaaaaaggaaaagaagaaagtaaaagacaaagatagggaccgagaccgggacaaagaccgagacaagaaaaaatctcatagcatcaagccagagagttggtccaaatcacccatctcttcagaccagtccttgtctatgacaagtaacacaatcttatctgcagacagaccctcaaggctcagcccagactttatgattggggaggaagatgatgatcttatggatgtggccctgattgggaattaggaaccttatttcctaaaagaaacagggccagaggaaaaaaaactattgataagtttataggcaaaccacc

SEQ ID NO: 22841 - DNA, 1588 bp, Homo Sapiens
taaagtgtttctttttttcttcttctttttagcttacagttgaacatgagtcttcttatgattagtgagaatgtaaaattggctcgtgaatatgcattgctgggaaactatgactctgcgatggtctattatcagggagttcttgaccaaatgaacaagtatctgtactcagtcaaagatacatacctccagcagaaatggcaacaggtttggcaggaaataaatgtggaagctaaacatgttaaagatatcatgaaaacactagagagctttaaactggacagcactcccttgaaagcggcacagcatgaccttccagcttctgagggagaagtctggtccatgcctgtacctgttgaacgaagaccctcaccaggacctagaaaacgccaatcttctcagtacagtgaccctaaatcacatggtaatcgtccaagtacaactgtcagagttcaccgttcatctgcacagaatgttcacaatgacagagggaaagctgttcgttgtcgtgaaaagaaagaacagaataaaggaagagaggaaaagaacaaatcacctgctgcagtaacagaaccagagacaaataaatttgatagtaccggatatgataaagacttagtagaagctttggaaagagatataatttcccagaatcccaatgttcgatgggatgatatcgctgatttagtagaagctaaaaagttgcttaaggaagccgtagtgttaccaatgtggatgcccgaattctttaagggcattaggagaccatggaaaggagtactgatggtcggcccacctggcacggggaagacgctccttgctaaagcagtagctacagaatgcaagacaacattcttcaatgtctcttcatcaactttgacttccaaatacagaggagaatctgagaagcttgttcgtcttctgtttgaaatggctcgattttattctccagccaccatatttattgatgagatagactccatctgtagtcgccgagggacttctgaagaacatgaagcaagcagaagggtgaaagcggagctgctggttcagatggatggtgttggaggtacttctgaaaatgatgacccttccaaaatggttatggttctggcagctactaattttccctgggatatagatgaggctttaagacgacgccttgagaaacgaatctatattcctttgccgtcagcaaaaggcagggaggagctattacgaataagtctacgtgagttggaattggctgatgatgttgaccttgcaagtatagcagaaaacatggaaggttattcaggtgcggacattaccaacgtgtgcagggatgcgtccttgatggcaatgagaaggcgcattgaaggtttgactccagaggaaatccgaaatctttccaaagaagaaatgcacatgcctacaactatggaggatttcgagatggctttaaaaaaggtttctaagtcagtgtctgctgcagacattgaaagatacgagaaatggatatttgagtttggatcatgctaactcgagaagccgaattccagcacactggcggccgttactagtggatcccgagctcggtaccaagctt

SEQ ID NO: 22842 - DNA, 4469 bp, Homo Sapiens
cctgcagcctccggagtcagtgccgcgcgcccgccgccccgcgccttcctgctcgccgcacctccgggagccggggcgcacccagcccgcagcgccgcctccccgcccgcgccgcctccgaccgcaggccgagggccgccactggccggggggaccgggcagcagcttgcggccgcggagccgggcaacgctggggactgcgccttttgtccccggaggtccctggaagtttgcggcaggacgcgcgcggggaggcggcggaggcagccccgacgtcgcggagaacagggcgcagagccggcatgggcatcgggcgcagcgaggggggccgccgcggggccctgggcgtgctgctggcgctgggcgcggcgcttctggccgtgggctcggccagcgagtacgactacgtgagcttccagtcggacatcggcccgtaccagagcgggcgcttctacaccaagccacctcagtgcgtggacatccccgcggacctgcggctgtgccacaacgtgggctacaagaagatggtgctgcccaacctgctggagcacgagaccatggcggaggtgaagcagcaggccagcagctgggtgcccctgctcaacaagaactgccacgccgggacccaggtcttcctctgctcgctcttcgcgcccgtctgcctggaccggcccatctacccgtgtcgctggctctgcgaggccgtgcgcgactcgtgcgagccggtcatgcagttcttcggcttctactggcccgagatgcttaagtgtgacaagttcccggagggggacgtctgcatcgccatgacgccgcccaatgccaccgaagcctccaagccccaaggcacaacggtgtgtcctccctgtgacaacgagttgaaatctgaggccatcattgaacatctctgtgccagcgagtttgcactgaggatgaaaataaaagaagtgaaaaaagaaaatggcgacaagaagattgtccccaagaagaagaagcccctgaagttggggcccatcaagaagaaggacctgaagaagcttgtgctgtacctgaagaatggggctgactgtccctgccaccagctggacaacctcagccaccacttcctcatcatgggccgcaaggtgaagagccagtacttgctgacggccatccacaagtgggacaagaaaaacaaggagttcaaaaacttcatgaagaaaatgaaaaaccatgagtgccccacctttcagtccgtgtttaagtgattctcccgggggcagggtggggagggagcctcgggtggggtgggagcgggggggacagtgcccgggaacccgtggtcacacacacgcactgccctgtcagtagtggacattgtaatccagtcggcttgttcttgcagcattcccgctccctttccctccatagccacgctccaaaccccagggtagccatggccgggtaaagcaagggccatttagattaggaaggtttttaagatccgcaatgtggagcagcagccactgcacaggaggaggtgacaaaccatttccaacagcaacacagccactaaaacacaaaaagggggattgggcggaaagtgagagccagcagcaaaaactacattttgcaacttgttggtgtggatctattggctgatctatgcctttcaactagaaaattctaatgattggcaagtcacgttgttttcaggtccagagtagtttctttctgtctgctttaaatggaaacagactcataccacacttacaattaaggtcaagcccagaaagtgataagtgcagggaggaaaagtgcaagtccattatctaatagtgacagcaaagggaccaggggagaggcattgccttctctgcccacagtctttccgtgtgattgtctttgaatctgaatcagccagtctcagatgccccaaagtttcggttcctatgagcccggggcatgatctgatccccaagacatgtggaggggcagcctgtgcctgcctttgtgtcagaaaaaggaaaccacagtgagcctgagagagacggcgattttcgggctgagaaggcagtagttttcaaaacacatagttaaaaaagaaacaaatgaaaaaaattttagaacagtccagcaaattgctagtcagggtgaattgtgaaattgggtgaagagcttaggattctaatctcatgttttttccttttcacatttttaaaagaacaatgacaaacacccacttatttttcaaggttttaaaacagtctacattgagcatttgaaaggtgtgctagaacaaggtctcctgatccgtccgaggctgcttcccagaggagcagctctccccaggcatttgccaagggaggcggatttccctggtagtgtagctgtgtggctttccttcctgaagagtccgtggttgccctagaacctaacaccccctagcaaaactcacagagctttccgtttttttctttcctgtaaagaaacatttcctttgaacttgattgcctatggatcaaagaaattcagaacagcctgcctgttcccccgcactttttacatatatttgtttcatttctgcagatggaaagttgacatgggtggggtgtccccatccagcgagagagtttcaaaagcaaaacatctctgcagtttttcccaagtaccctgagatacttcccaaagcccttatgtttaatcagcgatgtatataagccagttcacttagacaactttacccttcttgtccaatgtacaggaagtagttctaaaaaaaatgcatattaatttcttcccccaaagccggattcttaattctctgcaacactttgaggacatttatgattgtccctctgggccaatgcttatacccagtgaggatgctgcagtgaggctgtaaagtggccccctgcggccctagcctgacccggagaaaggatggtagattctgttaactcttgaagactccagtatgaaaatcagcatgcccgcctagttacctaccggagagttatcctgataaattaacctctcacagttagtgatcctgtccttttaacaccttttttgtggggttctctctgacctttcatcgtaaagtgctggggaccttaagtgatttgcctgtaattttggatgattaaaaaatgtgtatatatattagctaattagaaatattctacttctctgttgtcaaactgaaattcagagcaagttcctgagtgcgtggatctgggtcttagttctggttgattcactcaagagttcagtgctcatacgtatctgctcattttgacaaagtgcctcatgcaaccgggccctctctctgcggcagagtccttagtggaggggtttacctggaacataagtagttaccacagaatacggaagagcaggtgactgtgctgtgcagctctctaaatgggaattctcaggtaggaagcaacagcttcagaaagagctcaaaataaattggaaatgtgaatcgcagctgtgggttttaccaccgtctgtctcagagtcccaggaccttgagtgtcattagttactttattgaaggttttagacccatagcagctttgtctctgtcacatcagcaatttcagaaccaaaagggaggctctctgtaggcacagagctgcactatcacgagcctttgtttttctccacaaagtatctaacaaaaccaatgtgcagactgattggcctggtcattggtctccgagagaggaggtttgcctgtgatttgcctgtgatttcctaattatcgctagggccaaggtgggatttgtaaagctttacaataatcattctggatagagtcctgggaggtccttggcagaactcagttaaatctttgaagaatatttgtagttatcttagaagatagcatgggaggtgaggattccaaaaacattttatttttaaaatatcctgtgtaacacttggctcttggtacctgtgggttagcatcaagttctccccagggtagaattcaatcagagctccagtttgcatttggatgtgtaaattacagtaatcccatttcccaaacctaaaatctgtttttctcatcagactctgagtaactggttgctgtgtcataacttcatagatgcaggaggctcaggtgatctgtttgaggagagcaccctaggcagcctgcagggaataacatactggccgttctgacctgttgccagcagatacacaggacatggatgaaattcccgtttcctctagtttcttcctgtagtactcctcttttagatcctaagtctcttacaaaagctttgaatactgtgaaaatgttttacattccatttcatttgtgttgtttttttaactgcattttaccagatgttttgatgttatcgcttatgttaatagtaattcccgtacgtgttcattttattttcatgctttttcagccatgtatcaatattcacttgactaaaatcactcaattaatcaatgaaaaaaaaaaa

SEQ ID NO: 22843 - DNA, 2628 bp, Homo Sapiens
tttgtgtggactgagtgttttggccatcccggtccactctcacaggctccgttaagtgacatgaactctcaggaggactgagccagaagcggacagggcaagacgagctgtgcttgaaggaagaggggcagaaaatcgagggtcagggactgagaagctactccggtttagaaaccccagagacacccgtgtagatgggtacatcacggcttctctcccacgttaagacttaataaagaaagcctgatctttgaccagatggcagtaacatttgaagatgtgactattatttttacatgggaggagtggaaattcctggattcttctcaaaaaagactctacagggaggtcatgtgggagaactacacaaatgtcatgtcagtagaaaactggaatgagagctacaaatcccaagaagaaaaattcagatacttagaatatgaaaatttttcctactggcaaggctggtggaatgctggcgcccagatgtatgagaatcagaactatggggaaactgttcaagggacagattccaaagacctcacacagcaagatcgttcccagtgtcaggaatggttaatactctccacacaagtaccagggtatgggaactatgaactgacttttgaaagcaaaagtctcaggaacttaaaatataaaaattttatgccttggcagtccttagaaacaaaaaccactcaagactatggtagagaaatctacatgagtggttcacatggttttcaagggggcagataccgtcttggcatatccaggaaaaacctctccatggaaaaagaacagaagctcatagttcagcattcttatatcccagtggaggaagcccttccacagtatgttggggtgatatgtcaagaagacctactgagagattcaatggaagaaaagtactgtggatgtaataaatgtaaaggaatttattattggaactcacggtgtgttttccacaagagaaatcaacctggagaaaacctctgtcaatgctccatccgtaaagcatgcttctctcagagatcagacttgtatagacatccaagaaaccacataggtaagaagctgtacggatgtgatgaagttgacggtaactttcatcagagctccggagttcactttcatcagagagttcacataggggaggtaccttatagctgtaatgcatgtggtaagagcttcagccagatctctagtcttcacaatcatcaaagagtccacacagaagagaaattctataaaattgagtgtgataaagacctcagtagaaattcattacttcacattcaccagagacttcacataggagagaagccttttaaatgtaatcagtgtggtaagagttttaatcggagttcagtacttcatgttcatcagagagtccacacaggagaaaaaccatataagtgtgatgagtgtggtaagggtttcagccagagctcaaatcttcgaattcatcagttagtacacacaggagagaagtcttataaatgtgaagactgtggtaaaggctttacccagcgctcaaatcttcaaattcatcagagagtgcatacaggagagaaaccttataaatgtgatgactgtggaaaggactttagtcacagctcagatcttcgcattcatcagagagtccatacaggggagaaaccctatacttgtcctgaatgtgggaagggcttcagtaagagttcaaagcttcacactcatcaaagagtacatactggagagaaaccctacaaatgtgaagagtgtggcaagggattcagtcagcgttcacatcttctcattcatcagagagtccatacaggagaaaagccctataaatgtcatgattgtggaaagggttttagtcacagttctaatcttcacattcatcagagggtccatacaggagagaagccttatcaatgtgctaagtgtggtaaaggtttcagtcatagctcagctcttcgaattcatcaaagagtccatgcaggagagaaaccttacaaatgccgtgaatattataagggatttgatcataattcacatcttcacaataatcatagaagaggaaacttataaatattgttcatttagttaacagctttaatcaaagtttacctaacctttaaaccctataaatcctgctgttaaggaaatcttataaataacacaagtaatcccaagcaacatttatagtttcccctatctcccactaagaattatttgcttcaaaaggagatctttagaaaaatccctatatatttaaaattatagtgtatttttctttacctactataaatataatacagtcataaatatattaaacatttaaggagaaaactcttcattctatttcattctagtctttttttctgtgcattttaatgtgcatgaaattatattgtgtgttcaattttgtattttcactgtcttcaaaatatttacttaaattttggtttgaattgaaactggttggccaactgttaaacaacatctcttaactcccctaaaaactccctaggaagtaacagaaaagatggaaacacacagaacttaaaactcagttttggccggtagaattcaattgtttatggacaaaagccacctaataaaagataggaaagcatt

SEQ ID NO: 22844 - DNA, 3480 bp, Homo Sapiens
tgcagaaagggacggggctggcaaaggcctggtctacctcaccgatccaggtcgcgggggctcctagggggttccttccacagctggtgcgcgtgcgcaggagtgcgtcgaggttgttccgcggcaatttatgaaactcggagccggcagtgagttgagggttcggcgaggtcagggattcctagttgcagcgtgattaccaacgccagctcccttcactgtccaagacagcgattccgcggctcctctgagaactggcgctttgttcatcatttgccacttaagctacttgcagtcacgtcacaccttggatctctatcatcaaaactattccacctcggaaatcttacctaaatgcagcatgccatcctgaacgtctctccctgtcctagctctgtamctgtttacattgctcaggtacctgaatattggctttgtgtctaaagtttctggaactttcctccttaccgtgaaataacttggcttaaatcacactgcatatagtacacaggtgcttagctcaagcctgagaattactgcaatctagtaaggcggatttgaactactgtgggagttctatttaggaagatgcagcctctgagcaagttgatggctatctcaaaacctcgaaacctgtctctacgtgaacaaagagaggttctgagagcagatatgtcttggcagcaggaaaccaaccccgtcgtggagacacatgactctgaggcatctcgtcaaaagttcagacatttccagtatttgaaagtgtctgggccccatgaagccctgagccaactctgggagctctgtcttcaatggctgagaccagagattcatacaaagaagcagattatagaactgttggtgctggaacaattcctggcaatcctgcctgaagaagtcaggacttgggtgaatttacaacatccaaacaacagtaaagatatggtgaccctcatagaagatgtgattgaaatgcttgaagatgaagatatgccctgcaaggactctgccctgcagatggggagcatcaaggagaaaatgaaagctggctcacgaacaggcaaaccacaggaaccagtgacattcaaagatgtggttgtggaattcagcaaggaagagtgggggcaactggactctgctgtaaagaacctgtacaggaatgtgatgctggaaaactttaggaacctgaattcattgcgtaaagcacatctactttccaaaccatttgagagccttaagttggagagtaagaaaaaaagatggataatggagaaagaaataccaaggaagactatttttgacatgaagagtatttctggagaagaatcatcccatggagtgattatgacaaggcttaccgaaagtggacacccttcttcagatgcctggaaaggtgagaattggttatataggaaccagaaaaaatgggacataaatttgccacaagaggctttcattcctgagacaatttacactgaggaggaagattttgaatgtagtgaaaataagaaaagctttgatattaattcagttagctcaatttgtgctatacaactgggaattccttcaagaaaggggtctccaaaatgtgataagtttaaaacttacttcaaatttaatttagactcagtaggtaagcaacattcagaatatgaatatgggaatgacttgagtttgagtacagatattcgacaccaaaaaagtcatactacaatgaattcctatgaatgttatcaatgtgggaaagccttctgccgaagttcatcccttattcgacatcagatcattcacacaggagagaaaccctataaatgcagtgaatgtgggagattcttcaaccgacgtacaaaccttactaagcatcaaaaacttcatgctgaagcaaaggcctgcacaagcaataaatgtggaaaggccttcagtaaaagtgaagacagtaataatccaacactccattttggaaacaatttctatcaatgtgttaactgtggaaaatccttcaaccggagctcctctcttattcgacaccaaatgattcacacgggagagaaaccattcaaatgtaaggaatgtagtaaagccttcaacaggagttcaaaccttgttaaacatcaaaaactgcatactcgagataagtcctgaaaaaagaaaaaatgaaagattaccttcagtcagaatgcagaactcatttaacatcatgaatttatgctggataaaatctcatgaataataatgtaagaaaacatttgtcagatatccctcttaaatgatatcacagaatttaattgttggatagaaaaatcattggatagaaaatctgtttgaaggaatttcctggttttcagatgaagccataaggctttggagttaaaccacagtatcaccatacaagtatttgtttatcattattttgatatccattaccctcacctctccctagttcataaataggtctatagcatactaatatccacctgatttattgacgaagtagacattagcaaagccaaacaatactcttggagttgatatttaataaaactcagcccttttaagaaggtcacaagaaatcattagctcatgcgaatataagagaatacttctaaggacagaaatctctgaatcaatggctaagacaacagtaacagccatttactccactcctgacaataccctttgttgtcttgctgttgaatggagactagagttgggaaagggttatcaactgcaatgggagaagtatgtattgctgttaatctatatgtattcttaaaatctgcatttgtttatagcaggtccttgaaaaatgtttttgttttgttataatgttataattgttatgatgttgatgagaaaaatatcgattcccagccagggacactgtgtggagttcgcacactctccctatgtctccgggtgctccagtttcaaaccccaaagatgtatacattaggttaattgacatatctaaattatctcagtctgagtttgtgaggaagtgtgccctgcagtggaatggctcctaatcagggtttgttcccaccattgccctgagctgctaggatgcgctctgtccacccatggccctgtactggaataacagggtaaataattatcttatctgtttttattaatccgtcttaaatgtgtatatagctcagatttattttaatgtctgatattggaagcgtttggggtctttagaagtttgatgatgttgtgaccagacatttgccttaggaacttaactcttgtttgtatccattagtctatggtaaaattggttttgttatacatcatttcacttaaagttgcagttcctaagaacctattgatgatgttcagtgcagacttactgtacctttgggaatttaggctggagagacgtccatagccttaggtatatcatttataccagacattatgaagttattaaagtctcctatactctaaaaaaaaaaaaaaaaaaaaaaaaaaaaa

SEQ ID NO: 22845 - DNA, 3252 bp, Homo Sapiens
gcggcccaggcccggaaccttccctggtcgtgcgccctatgtaaggccagccgcggcaggaccaaggcggcggtgtcagctcgcgagcctaccctccgcggacggtcttgggtcgcctgctgcctggcttgcctggtcggcggcgggtgccccgcgcgcacgcgcaaagcccgccgcgttccccgaccccaggccgcgctctgtgggcctctgagggcggcatgcgggactacgacgaggtgaccgccttcctgggcgagtgggggcccttccagcgcctcatcttcttcctgctcagcgccagcatcatccccaatggcttcaccggcctgtcctccgtgttcctgatagcgaccccggagcaccgctgccgggtgccggacgccgcgaacctgagcagcgcctggcgcaaccacactgtcccactgcggctgcgggacggccgcgaggtgccccacagctgccgccgctaccggctcgccaccatcgccaacttctcggcgctcgggctggagccggggcgcgacgtggacctggggcagctggagcaggagagctgtctggatggctgggagttcagtcaggacgtctacctgtccaccattgtgaccgagtggaacctggtgtgtgaggacgactggaaggccccactcacaatctccttgttcttcgtgggtgtgctgttgggctccttcatttcagggcagctgtcagacaggtttggccggaagaatgtgctgttcgtgaccatgggcatgcagacaggcttcagcttcctgcagatcttctcgaagaattttgagatgtttgtcgtgctgtttgtccttgtaggcatgggccagatctccaactatgtggcagcatttgtcctggggacagaaattcttggcaagtcagttcgtataatattctctacgttaggagtgtgcatattttatgcatttggctacatggtgctgccactgtttgcttacttcatccgagactggcggatgctgctggtggcgctgacgatgccgggggtgctgtgcgtggcactctggtggttcatccctgagtccccccgatggctcatctctcagggacgatttgaagaggcagaggtgatcatccgcaaggctgccaaagccaatgggattgttgtgccttccactatctttgacccgagtgagttacaagacctaagttccaagaagcaacagtcccacaacattctggatctgcttcgaacctggaatatccggatggtcaccatcatgtccataatgctgtggatgaccatatcagtgggctattttgggctttcgcttgatactcctaacttgcatggggacatctttgtgaactgcttcctttcagcgatggttgaagtcccagcatatgtgttggcctggctgctgctgcaatatttgccccggcgctattccatggccactgccctcttcctgggtggcagtgtccttctcttcatgcagctggtacccccagacttgtattatttggctacagtcctggtgatggtgggcaagtttggagtcacggctgccttttccatggtctacgtgtacacagccgagctgtatcccacagtggtgagaaacatgggtgtgggagtcagctccacagcatcccgcctgggcagcatcctgtctccctacttcgtttaccttggtgcctacgaccgcttcctgccctacattctcatgggaagtctgaccatcctgacagccatcctcaccttgtttctcccagagagcttcggtaccccactcccagacaccattgaccagatgctaagagtcaaaggaatgaaacacagaaaaactccaagtcacacaaggatgttaaaagatggtcaagaaaggcccacaatccttaaaagcacagccttctaacatcgcttccagtaagggagaaactgaagaggaaagactgtcttgctagaaatggccagcttgtgcagactccgagtccttcagtgacaaaggcctttgctgtttgtcctcttgacctgtgtctgacttgctcctggatgggcacccacactcagaggctacatatggccctagagcaccaccttcctctagggacactggggctacctacagacaacttcatctaagtcctaactattacaatgatggactcagcacctccaaagcagttaatttttcactagaaccagtgagatctggaggaatgtgagaagcatatgctaaatgtacattttaattttagactacttgaaaaggcccctaataaggctagaggtctaagtcccccacccctttccccactcccctctagtggtgaactttagaggaaaaggaagtaattgcacaaggagtttgattcttaccttttctcagttacagaggacattaactggatcattgcttccccagggcaggagagcgcagagctagggaaagtgaaaggtaatgaagatggagcagaatgagcagatgcagatcaccagcaaagtgcactgatgtgtgagctcttaagaccactcagcatgacgactgagtagacttgtttacatctgatcaaagcactgggcttgtccaggctcataataaatgctccattgaatctactattcttgttttccactgctgtggaaacctccttgctactatagcgtcttatgtatggtttaaaggaaatttatcaggtgagagagatgagcaacgttgtcttttctctcaaagctgtaatgtgggttttgttttactgtttatttgtttgttgttgtatccttttctccttgttatttgcccttcagaatgcacttgggaaaggctggttccttagcctcctggtttgtgtctttttttttttttttttaaacacagaatcactctggcaattgtctgcagctgccactggtgcaaggccttaccagccctagcctctagcacttctctaagtgccaaaaacagtgtcattgtgtgtgttcctttcttgatacttagtcatgggaggatattacaaaaaagaaatttaaattgtgttcatagtctttcagagtagctcactttagtcctgtaactttattgggtgatattttgtgttcagtgtaattgtcttctctttgctgattatgttaccatggtactcctaaagcatatgcctcacctggttaaaaaagaacaaacatgtttttgtgaaagctactgaagtgccttgggaaatgagaaagttttaataagtaaaatgattttttaaatatcaaaaaaaaaaaaaaaa

SEQ ID NO: 22846 - DNA, 4384 bp, Homo Sapiens
ggaagctgtgagagcgcggttgcggggtcgcattgtggctacggctttgcgtccccggcgggcagcccaggctggtccccgcctccgctctccccaccggcggggaaagcagctggtgtgggaggaaaggctccatcccccgccccctctctcccgctgttggctggcaggatcttttggcagtcctgtggcctcgctccccgcccggatcctcctgaccctgagattcgcgggtctcacgtcccgtgcacgccttgcttcggcctcagttaagcctttgtggactccaggtccctggtgagattagaaacgtttgcaaacatgtcccggatcgaaaagatgagcattctgggcgtgcggagttttggaatagaggacaaagataagcaaattatcactttcttcagcccccttacaattttggttggacccaatggggcgggaaagacgaccatcattgaatgtctaaaatatatttgtactggagatttccctcctggaaccaaaggaaatacatttgtacacgatcccaaggttgctcaagaaacagatgtgagagcccagattcgtctgcaatttcgtgatgtcaatggagaacttatagctgtgcaaagatctatggcatggtgaaaaggtcagtctgagctctaagtgtgcagaaattgaccgagaaatgatcagttctcttggggtttccaaggctgtgctaaataatgtcattttctgtcatcaagaagattctaattggcctttaagtgaaggaaaggctttgaagcaaaagtttgatgagattttttcagcaacaagatacattaaagccttagaaacacttcggcaggtacgtcagacacaaggtcagaaagtaaaagaatatcaaatggaactaaaatatctgaagcaatataaggaaaaagcttgtgagattcgtgatcagattacaagtaaggaagcccagttaacatcttcaaaggaaattgtcaaatcctatgagaatgaacttgatccattgaagaatcgtctaaaagaaattgaacataatctctctaaaataatgaaacttgacaatgaaattaaagccttggatagccgaaagaagcaaatggagaaagataatagtgaactggaagagaaaatggaaaaggtttttcaagggactgatgagcaactaaatgacttatatcacaatcaccagagaacagtaagggagaaagaaaggaaattggtagactgtcatcgtgaactggaaaaactaaataaagaatctaggcttctcaatcaggaaaaatcagaactgcttgttgaacagggtcgtctacagctgcaagcagatcgccatcaagaacatatccgagctagagattcattaattcagtctttggcaacacagctagaattggatggctttgagcgtggaccattcagtgaaagacagattaaaaattttcacaaacttgtgagagagagacaagaaggggaagcaaaaactgccaaccaactgatgaatgactttgcagaaaaagagactctgaaacaaaaacagatagatgagataagagataagaaaactggactgggaagaataattgagttaaaatcagaaatcctaagtaagaagcagaatgagctgaaaaatgtgaagtatgaattacagcagttggaaggatcttcagacaggattcttgaactggaccaggagctcataaaagctgaacgtgagttaagcaaggctgagaaaaacagcaatgtagaaaccttaaaaatggaagtaataagtctccaaaatgaaaaagcagacttagacaggaccctgcgtaaacttgaccaggagatggagcagttaaaccatcatacaacaacacgtacccaaatggagatgctgaccaaagacaaagctgacaaagatgaacaaatcagaaaaataaaatctaggcacagtgatgaattaacctcactgttgggatattttcccaacaaaaaacagcttgaagactggctacatagtaaatcaaaagaaattaatcagaccagggacagacttgccaaattgaacaaggaactagcttcatctgagcagaataaaaatcatataaataatgaactaaaaagaaaggaagagcagttgtccagttacgaagacaagctgtttgatgtttgtggtagccaggattttgaaagtgatttagacaggcttaaagaggaaattgaaaaatcatcaaaacagcgagccatgttggctggagccacagcagtttactcccagttcattactcagctaacagacgaaaaccagtcatgttgccccgtttgtcagagagtttttcagacagaggctgagttacaagaagtcatcagtgatttgcagtctaaactgcgacttgctccagataaactcaagtcaacagaatcagagctaaaaaaaaaggaaaagcggcgtgatgaaatgctgggacttgtgcccatgaggcaaagcataattgatttgaaggagaaggaaataccagaattaagaaacaaactgcagaatgtcaatagagacatacagcgcctaaagaacgacatagaagaacaagaaacactcttgggtacaataatgcctgaagaagaaagtgccaaagtatgcctgacagatgttacaattatggagaggttccagatggaacttaaagatgttgaaagaaaaattgcacaacaagcagctaagctacaaggaatagacttagatcgaactgtccaacaagtcaaccaggagaaacaagagaaacagcacaagttagacacagtttctagtaagattgaattgaatcgtaagcttatacaggaccagcaggaacagattcaacatctaaaaagtacaacaaatgagctaaaatctgagaaacttcagatatccactaatttgcaacgtcgtcagcaactggaggagcagactgtggaattatccactgaagttcagtctttgtacagagagataaaggatgctaaagagcaggtaagccctttggaaacaacattggaaaagttccagcaagaaaaagaagaattaatcaacaaaaaaaatacaagcaacaaaatagcacaggataaactgaatgatattaaagagaaggttaaaaatattcatggctatatgaaagacattgagaattatattcaagatgggaaagacgactataagaagcaaaaagaaactgaacttaataaagtaatagctcaactaagtgaatgcgagaaacacaaagaaaagataaatgaagatatgagactcatgagacaagatattgatacacagaagatacaagaaaggtggctacaagataaccttactttaagaaaaagaaatgaggaactaaaagaagttgaagaagaaagaaaacaacatttgaaggaaatgggtcaaatgcaggttttgcaaatgaaaagtgaacatcagaagttggaagagaacatagacaatataaaaagaaatcataatttggcattagggcgacagaaaggttatgaagaagaaattattcattttaagaaagaacttcgagaaccacaatttcgggatgctgaggaaaagtatagagaaatgatgattgttatgaggacaacagaacttgtgaacaaggatctcgatatttattataagactcttgaccaagcaataatgaaatttcacagtatgaaaatggaagaaatcaataaaattatacgtgacctgtggcgaagtacctatcgtggacaagatattgaatacatagaaatacggtctgatgccgatgaaaatgtatcagcttctgataaaaggcggaattataactaccgagtggtgatgctgaagggagacacagccttggatatgcgaggacgatgcagtgctggacaaaaggtattagcctcactcatcattcgcctggccctggctgaaacgttctgcctcaactgtggcatcattgccttggatgagccaacaacaaatcttgaccgagaaaacattgaatctcttgcacatgctctggttgagataataaaaagtcgctcacagcagcgtaacttccagcttctggtaatcactcatgatgaagattttgtggagcttttaggacgttctgaatatgtggagaaattctacaggattaaaaagaacatcgatcagtgctcagagattgtgaaatgcagtgttagctccctgggattcaatgttcattaaaaatatccaagatttaaatgccatagaaatgtaggtcctcagaaagtgtataataagaaacttatttctcatatcaacttagtcaataagaaaatatattctttcaaaggaaaaaaaaaaaaaaaaaaaaaaaaaaaaaaaaaaaaaaaaaaaaaaaaaaaaaaaaaaaaaaaaaaaaaaaaaaaaaaa

SEQ ID NO: 22847 - DNA, 3667 bp, Homo Sapiens
tatatcatgtaagctagtcacacctatttgaattcacttttctttgtttcttgatttcttatggctattattgcaacaatcaaacaaattttgaataccttttgtgagctagcactgtggaaatatgagggaagtttattgtgttcttactttaaatagtttgcagttttattgtgtatacaaatgtatgcatgtgaaatatacagattttaaaaaagcagatcattaaagattaggtcataaggtgtagtctgtacatggaggaagagctaagttgattcagaataacatggttagatttcgaagctagcctggatttgaatcttggatccaccactgactagctatgtaagcttagtcaagcaactcaacggaggaggcgaggagcgccgggtaccgggccgggggagccgcgggctctcggggaagagacggatgatgaacaagctttacatcgggaacctgagccccgccgtcaccgccgacgacctccggcagctctttggggacaggaagctgcccctggcgggacaggtcctgctgaagtccggctacgccttcgtggactaccccgaccagaactgggccatccgcgccatcgagaccctctcgggtaaagtggaattgcatgggaaaatcatggaagttgattactcagtctctaaaaagctaaggagcaggaaaattcagattcgaaacatccctcctcacctgcagtgggaggtgttggatggacttttggctcaatatgggacagtggagaatgtggaacaagtcaacacagacacagaaaccgccgttgtcaacgtcacatatgcaacaagagaagaagcaaaaatagccatggagaagctaagcgggcatcagtttgagaactactccttcaagatttcctacatcccggatgaagaggtgagctccccttcgccccctcagcgagcccagcgtggggaccactcttcccgggagcaaggccacgcccctgggggcacttctcaggccagacagattgatttcccgctgcggatcctggtccccacccagtttgttggtgccatcatcggaaaggagggcttgaccataaagaacatcactaagcagacccagtcccgggtagatatccatagaaaagagaactctggagctgcagagaagcctgtcaccatccatgccaccccagaggggacttctgaagcatgccgcatgattcttgaaatcatgcagaaagaggcagatgagaccaaactagccgaagagattcctctgaaaatcttggcacacaatggcttggttggaagactgattggaaaagaaggcagaaatttgaagaaaattgaacatgaaacagggaccaagataacaatctcatctttgcaggatttgagcatatacaacccggaaagaaccatcactgtgaagggcacagttgaggcctgtgccagtgctgagatagagattatgaagaagctgcgtgaggcctttgaaaatgatatgctggctgttaacacccactccggatacttctccagcctgtacccccatcaccagtttggcccgttcccgcatcatcactcttatccagagcaggagattgtgaatctcttcatcccaacccaggctgtgggcgccatcatcgggaagaagggggcacacatcaaacagctggcgagattcgccggagcctctatcaagattgcccctgcggaaggcccagacgtcagcgaaaggatggtcatcatcaccgggccaccggaagcccagttcaaggcccagggacggatctttgggaaactgaaagaggaaaacttctttaaccccaaagaagaagtgaagctggaagcgcatatcagagtgccctcttccacagctggccgggtgattggcaaaggtggcaagaccgtgaacgaactgcagaacttaaccagtgcagaagtcatcgtgcctcgtgaccaaacgccagatgaaaatgaggaagtgatcgtcagaattatcgggcacttctttgctagccagactgcacagcgcaagatcagggaaattgtacaacaggtgaagcagcaggagcagaaataccctcagggagtcgcctcacagcgcagcaagtgaggctcccacaggcaccagcaaaacaacggatgaatgtagcccttccaacacctgacagaatgagaccaaacgcagccagccagatcgggagcaaaccaaagaccatctgaggaatgagaagtctgcggaggcggccagggactctgccgaggccctgagaaccccaggggccgaggaggggcggggaaggtcagccaggtttgccagaaccaccgagccccgcctcccgccccccagggcttctgcaggcttcagccatccacttcaccatccactcggatctctcctgaactcccacgacgctatcccttttagttgaactaacataggtgaacgtgttcaaagccaagcaaaatgcacaccctttttctgtggcaaatcgtctctgtacatgtgtgtacatattagaaagggaagatgttaagatatgtggcctgtgggttacacagggtgcctgcagcggtaatatattttagaaataatatatcaaataactcaactaactccaatttttaatcaattattaatttttttttctttttaaagagaaagcaggcttttctagactttaaagaataaagtctttgggaggtctcacggtgtagagaggagctttgaggccacccgcacaaaattcacccagagggaaatctcgtcggaaggacactcacggcagttctggatcacctgtgtatgtcaacagaagggataccgtctccttgaagaggaaactctgtcactcctcatgcctgtctagctcatacacccatttctctttgcttcacaggttttaaactggttttttgcatactgctatataattctctgtctctctctgtttatctctcccctccctcccctccccttcttctccatctccattcttttgaatttcctcatccctccatctcaatcccgtatctacgcaccccccccccccaggcaaagcagtgctctgagtatcacatcacacaaaaggaacaaaagcgaaacacacaaaccagcctcaacttacacttggttactcaaaagaacaagagtcaatggtacttgtcctagcgttttggaagaggaaaacaggaacccaccaaaccaaccaatcaaccaaacaaagaaaaaattccacaatgaaagaatgtattttgtctttttgcattttggtgtataagccatcaatattcagcaaaatgattcctttctttaaaaaaaaaaaatgtggaggaaagtagaaatttaccaaggttgttggcccagggcgttaaattcacagatttttttaacgagaaaaacacacagaagaagctacctcaggtgtttttacctcagcaccttgatcttgtgtttcccttagagattttgtaaagctgatagttggagcatttttttatttttttaataaaaatgagttggaaaaaaaataagatatcaactgccagcctggagaaggtgacagtccaagtgtgcaacagctgttctgaattgtcttccgctagccaagaacctatatggccttcttttggacaaaccttgaaaatgtttatttaaaaaaaaaaaaaaaaaa

SEQ ID NO: 22848 - DNA, 1466 bp, Homo Sapiens
ctgcgcagtgtgaccgggatggcgcattttcttgcaccaactaatgcggtgtcgctggcggctgaggagggcggagagttctgtggtgaaatagtgggaaggattcatgtaggcatcgggaagagcctaagtccacattataaaataggaagttgatgcggggtacagttactcccggaccggcggcgtgaaagtcgtgatatcatcgttgaactattagctttgaagtttaaatccaatggagaagactcaagaaacagtccaaagaattcttctagaaccctataaatacttacttcagttaccaggtaaacaagtgagaaccaaactttcacaggcatttaatcattggctgaaagttccagaggacaagctacagattattattgaagtgacagaaatgttgcataatgccagtttactcatcgatgatattgaagacaactcaaaactccgacgtggctttccagtggcccacagcatctatggaatcccatctgtcatcaattctgccaattacgtgtatttccttggcttggagaaagtcttaacccttgatcacccagatgcagtgaagctttttacccgccagcttttggaactccatcagggacaaggcctagatatttactggagggataattacacttgtcccactgaagaagaatataaagctatggtgctgcagaaaacaggtggactgtttggattagcagtaggtctcatgcagttgttctctgattacaaagaagatttaaaaccgctacttaatacacttgggctctttttccaaattagggatgattatgctaatctacactccaaagaatatagtgaaaacaaaagtttttgtgaagatctgacagagggaaagttctcatttcctactattcatgctatttggtcaaggcctgaaagcacccaggtgcagaatatcttgcgccagagaacagaaaacatagatataaaaaaatactgtgtacattatcttgaggatgtaggttcttttgaatacactcgtaatacccttaaagagcttgaagctaaagcctataaacagattgatgcacgtggtgggaaccctgagctagtagccttagtaaaacacttaagtaagatgttcaaagaagaaaatgaataatgttaagccattcttgattggacctcatagcttattttagttaatcttttttttgtcttttagccttaccaccttttaaaaaatttgttattctccagaaacagtaaataggtgagtaggggtggtgcaagtgaattcgttttcatttagaagcccctctgtacagataatcaaaattcaaagttgaaagaatcaaaagcagccacagttatgtaggtctgatttgaatgtcataattgcagtgacaggacattgccaccaactctatcctactaccatcaatgttgtgtttattccgtcaataaaaaagacttgcttccaggaa

SEQ ID NO: 22849 - DNA, 5117 bp, Homo Sapiens
aattcggcacgagggggggcagcagcggacgccgctaacggcctccctcggcgctgacaggctgggccggcgcccggctcgcttgggtgttcgcgtcgccacttcggcttctcggccggtcgggcccctcggcccgggcttgcggcgcgcgtcggggctgagggctgctgcggcgcagggagaggcctggtcctcgctgccgagggatgtgagtgggagctgagcccacactggagggcccccgagggcccagcctggaggtcgttcagagccgtgcccgccccggggcttcgcagaccttgacccgccgggtaggagccgcccctgcgggctcgagggcgcgctctggtcgcccgatctgtgtagccggtttcagaagcaggcaacaggaacaagatgtgaactgtttctcttctgcagaaaaagaggctcttcctcctcctcccgcgacggcaaatgttctgaaaaagactctgcatgggaatggcctgccttacgatgacagaaatggagggaacatccacctcttctatatatcagaatggtgatatttctggaaatgccaattctatgaagcaaatagatccagttcttcaggtgtatctttaccattcccttgggaaatctgaggcagattatctgacctttccatctggggagtatgttgcagaagaaatctgtattgctgcttctaaagcttgtggtatcacacctgtgtatcataatatgtttgctttaatgagtgaaacagaaaggatctggtatccacccaaccatgtcttccatatagatgagtcaaccaggcataatgtactctacagaataagattttactttcctcgttggtattgcagtggcagcaacagagcctatcggcatggaatatctcgaggtgctgaagctcctcttcttgatgactttgtcatgtcttacctctttgctcagtggcggcatgattttgtgcacggatggataaaagtacctgtgactcatgaaacacaggaagaatgtcttgggatggcagtgttagatatgatgagaatagccaaagaaaacgatcaaaccccactggccatctataactctatcagctacaagacattcttaccaaaatgtattcgagcaaagatccaagactatcatattttgacaaggaagcgaataaggtacagatttcgcagatttattcagcaattcagccaatgcaaagccactgccagaaacttgaaacttaagtatcttataaatctggaaactctgcagtctgccttctacacagagaaatttgaagtaaaagaacctggaagtggtccttcaggtgaggagatttttgcaaccattataataactggaaacggtggaattcagtggtcaagagggaaacataaagaaagtgagacactgacagaacaggatttacagttatattgcgatttttctaatattattgatgtcagtattaagcaagcaaaccaagagggttcaaatgaaagccgagttgtaactatccataagcaagatggtaaaaatctggaaattgaacttagctcattaagggaagctttgtctttcgtgtcattaattgatggatattatagattaactgcagatgcacatcattacctctgtaaagaagtagcacctccagccgtgcttgaaaatatacaaagcaactgtcatggcccaatttcgatggattttgccattagtaaactgaagaaagcaggtaatcagactggactgtatgtacttcgatgcagtcctaaggactttaataaatattttttgacttttgctgtcgagcgagaaaatgtcattgaatataaacactgtttgattacaaaaaatgagaatgaagagtacaacctcagtgggacaaagaagaacttcagcagtcttaaagatcttttgaattgttaccagatggaaactgttcgctcagacaatataattttccagtttactaaatgctgtcccccaaagccaaaagataaatcaaaccttctagtcttcagaacgaatggtgtttctgatgtaccaacctcaccaacattacagaggcctactcatatgaaccaaatggtgtttcacaaaatcagaaatgaagatttgatatttaatgaaagccttggccaaggcacttttacaaagatttttaaaggcgtacgaagagaagtaggagactacggtcaactgcatgaaacagaagttcttttaaaagttctggataaagcacacagaaactattcagagtctttctttgaagcagcaagtatgatgagcaagctttctcacaagcatttggttttaaattatggagtatgtgtctgtggagacgagaatattctggttcaggagtttgtaaaatttggatcactagatacatatctgaaaaagaataaaaattgtataaatatattatggaaacttgaagttgctaaacagttggcatgggccatgcattttctagaagaaaacacccttattcatgggaatgtatgtgccaaaaatattctgcttatcagagaagaagacaggaagacaggaaatcctcctttcatcaaacttagtgatcctggcattagtattacagttttgccaaaggacattcttcaggagagaataccatgggtaccacctgaatgcattgaaaatcctaaaaatttaaatttggcaacagacaaatggagttttggtaccactttgtgggaaatctgcagtggaggagataaacctctaagtgctctggattctcaaagaaagctacaattttatgaagataggcatcagcttcctgcaccaaagtgggcagaattagcaaaccttataaataattgtatggattatgaaccagatttcaggccttctttcagagccatcatacgagatcttaacagtttgtttactccagattatgaactattaacagaaaatgacatgttaccaaatatgaggataggtgccctggggttttctggtgcctttgaagaccgggatcctacacagtttgaagagagacatttgaaatttctacagcaacttggcaagggtaattttgggagtgtggagatgtgccggtatgaccctctacaggacaacactggggaggtggtcgctgtaaaaaagcttcagcatagtactgaagagcacctaagagactttgaaagggaaattgaaatcctgaaatccctacagcatgacaacattgtaaagtacaagggagtgtgctacagtgctggtcggcgtaatctaaaattaattatggaatatttaccatatggaagtttacgagactatcttcaaaaacataaagaacggatagatcacataaaacttctgcagtacacatctcagatatgcaagggtatggagtatcttggtacaaaaaggtatatccacagggatctggcaacgagaaatatattggtggagaacgagaacagagttaaaattggagattttgggttaaccaaagtcttgccacaagacaaagaatactataaagtaaaagaacctggtgaaagtcccatattctggtatgctccagaatcactgacagagagcaagttttctgtggcctcagatgtttggagctttggagtggttctgtatgaacttttcacatacattgagaagagtaaaagtccaccagcggaatttatgcgtatgattggcaatgacaaacaaggacagatgatcgtgttccatttgatagaacttttgaagaataatggaagattaccaagaccagatggatgcccagatgagatctatatgatcatgacagaatgctggaacaataatgtaaatcaacgcccctcctttagggatctagctcttcgagtggatcaaataagggataacatggctggatgaaagaaatgaccttcattctgagaccaaagtagatttacagaacaaagttttatatttcacattgctgtggactattattacatatatcattattatataaatcatgatgctagccagcaaagatgtgaaaatatctgctcaaaactttcaaagtttagtaagtttttcttcatgaggccaccagtaaaagacattaatgagaattccttagcaaggattttgtaagaagtttcttaaacattgtcagttaacatcactcttgtctggcaaaagaaaaaaaatagactttttcaactcagctttttgagacctgaaaaaattattatgtaaattttgcaatgttaaagatgcacagaatatgtatgtatagtttttaccacagtggatgtataataccttggcatcttgtgtgatgttttacacacatgagggctggtgttcattaatactgttttctaatttttccatagttaatctataattaattacttcactatacaaacaaattaagatgttcagataattgaataagtacctttgtgtccttgttcatttatatcgctggccagcattataagcaggtgtatacttttagcttgtagttccatgtactgtaaatatttttcacataaagggaacaaatgtctagttttatttgtataggaaatttccctgaccctaaataatacattttgaaatgaaacaagcttacaaagatataatctattttattatggtttcccttgtatctatttgtggtgaatgtgttttttaaatggaactatctccaaatttttctaagactactatgaacagttttcttttaaaattttgagattaagaatgccaggaatattgtcatcctttgagctgctgactgccaataacattcttcgatctctgggatttatgctcatgaactaaatttaagcttaagccataaaatagattagattgttttttaaaaatggatagctcattaagaagtgcagcaggttaagaattttttcctaaagactgtatatttgaggggtttcagaattttgcattgcagtcatagaagagatttatttcctttttagaggggaaatgaggtaaataagtaaaaaagtatgcttgttaattttattcaagaatgccagtagaaaattcataacgtgtatctttaagaaaaatgagcatacatcttaaatcttttcaattaaggtcgacgcggccgcggtcgacgcggccgcgaattc

SEQ ID NO: 22850 - DNA, 676 bp, Homo Sapiens
ctagaattcagcggccgtgaattgtgagagtgtgcagtcgcgttcctgctgtccggacacttttttcctctactgagactcatctggtagatccgcagccagtcctcccaggggctgaagttgtgaaatatgggttttctaagaagattaatctatcggcgtagaccaatgatctatgtagaatcttctgaggagtccagtgatgagcaacctgacgaagtggaatcaccaactcaaagtcaggattctacacctgctgaagagagagaggatgagggagcatctgcagctcaagggcaggagcctgaagctgatagccaggaactggttcagccaaagactgggtgtgagcctggagatggtcctgataccaagagggtgtgcctgcgaaatgaagagcagatgaaactgcccgcagaagggccagagcctgaagcggatagccaggaacaggttcacccgaagactgggtgtgagcgcggagatggtcctgatgtccaggagttgggcctgccaaatccagaggaggtgaaaacacctgaggaagatgaagggcaatcacagccttaaaagaagacacgctgaaatggttcaggctgctcctgtgttggaaatttgaccattaaaattctcccaataaagctttacagccttctgcaaaaaaaaaaaaaaaaaa

SEQ ID NO: 22851 - DNA, 3711 bp, Homo Sapiens
  misc_feature (3592)..(3592): n is a, c, g, or t
  misc_feature (3662)..(3662): n is a, c, g, or t
  misc_feature (3675)..(3675): n is a, c, g, or t
  misc_feature (3686)..(3686): n is a, c, g, or t
acagggtcgctgagaccagtgcacgagcctcttcggaagatgcatcctggactcttggccgcagaagagaaagcggttggggtctcccagggactctttctaaagggtcagtccaccatggtaggggttaacgtgggtccacccgtatagggaaaggaaagaaattgtatttgacacttcaggggggcgggtggcggacgggtctcgctgcctgattggttttgcatttcatcccaatttttttttctccactctctctccctcttttcagtttctctctctgatcccaggggaggggaaacgggaatagtgagagatcaaaaataaacctcttatgtcaagccgggaaggaagtataaataagaagggctcggcagcccactcggtgcttcccggggtggggaggaggcaggaggcggctgcgcggggctggcgcgggcaggggcggaggacgggcgcacgcgggccggggccagctgctcgcgctcggctcgggggcggcggcgcgggaggagcgggctgcgccagccagaggggccgccgggggagcgctcccgccgccgggccccgcgggcggagtcggccttgcacccgattgattccgttttcctggagagagcggccgggccgcgctcgggccgccagcacctgcccgcgcctggcgggtttttccttttcctgcgcgcagccaccgccgcagcccccatgttccccgcccccgccgccccccggtggcttccgttcctgctgctgctgctgctgctgctgctgccgctggcccgcggcgccccggcccggcccgcagccggggggcaggcctcggagctggtggtgcccacgcggttgcccggcagcgcgggcgagctcgcgctccacctgtccgccttcggcaagggcttcgtgttgcgcctggcgcccgacgacagcttcctggcgcccgagttcaagatcgagcgcctcgggggctccggccgggcgaccgggggcgagcgggggctgcgcggctgttttttttccggcaccgtgaatggggagcccgagtcgctggcggcggtcagcctgtgccgcgggctgagcggctccttcctgctggacggcgaggagttcaccatccagccgcagggcgcggggggctccctggctcagccgcaccgcctgcagcgctggggtcccgccggagcccgccccctcccgcgaggacccgagtgggaggtggagacgggagagggtcagaggcaggagagaggagaccaccaggaggacagcgaggaggagagccaagaagaggaggcagaaggcgctagcgagccgccaccgcccctgggggccacgagtaggaccaagcggtttgtgtctgaggcgcgcttcgtggagacgctgctggtggccgatgcgtccatggctgccttctacggggccgacctgcagaaccacatcctgacgttaatgtctgtggcagcccgaatctacaagcaccccagcatcaagaattccatcaacctgatggtggtaaaagtgctgatcgtagaagatgaaaaatggggcccagaggtgtccgacaatggggggcttacactgcgtaacttctgcaactggcagcggcgtttcaaccagcccagcgaccgccacccagagcactacgacacggccatcctgctcaccagacagaacttctgtgggcaggaggggctgtgtgacaccctgggtgtggcagacatcgggaccatttgtgaccccaacaaaagctgctccgtgatcgaggatgaggggctccaggcggcccacaccctggcccatgaactagggcacgtcctcagcatgccccacgacgactccaagccctgcacacggctcttcgggcccatgggcaagcaccacgtgatggcaccgctgttcgtccacctgaaccagacgctgccctggtccccctgcagcgccatgtatctcacagagcttctggacggcgggcacggagactgtctcctggatgcccctggtgcggccctgcccctccccacaggcctcccgggccgcatggccctgtaccagctggaccagcagtgcaggcagatctttgggccggatttccgccactgccccaacacctctgctcaggacgtctgcgcccagctttggtgccacactgatggggctgagcccctgtgccacacgaagaatggcagcctgccctgggctgacggcacgccgtgcgggcctgggcacctctgctcagaaggcagctgtctacctgaggaggaagtggagaggcccaagcccgtggtagatggaggctgggcaccgtggggaccctggggagaatgttctcggacctgtggaggaggagtacagttttcacaccgtgagtgcaaggaccccgagcctcagaatggaggaagatactgcctgggtcggagagccaagtaccagtcatgccacacggaggaatgcccccctgacgggaaaagcttcagggagcagcagtgtgagaagtataatgcctacaattacactgacatggacgggaatctcctgcagtgggtccccaagtatgctggggtgtccccccgggaccgctgcaagttgttctgccgagcccgggggaggagcgagttcaaagtgttcgaggccaaggtgattgatggcaccctgtgtgggccagaaacactggccatctgtgtccgtggccagtgtgtcaaggccggctgtgaccatgtggtggactcgcctcggaagctggacaaatgcggggtgtgtgggggcaaaggcaactcctgcaggaaggtctccgggtccctcacccccaccaattatggctacaatgacattgtcaccatcccagctggtgccactaatattgacgtgaagcagcggagccacccgggtgtgcagaacgatgggaactacctggcgctgaagacggctgatgggcagtacctgctcaacggcaacctggccatctctgccatagagcaggacatcttggtgaaggggaccatcctgaagtacagcggctccatcgccaccctggagcgcctgcagagcttccggcccttgccagagcctctgacagtgcagctcctgacagtccctggcgaggtcttccccccaaaagtcaaatacaccttctttgttcctaatgacgtggactttagcatgcagagcagcaaagagagagcaaccaccaacatcatccagccgctgctccacgcacagtgggtgctgggggactggtctgagtgctctagcacctgcggggccggctggcagaggcgaactgtagagtgcagggacccctccggccaggcctctgccacctgcaacaaggctctgaaacccgaggatgccaagccctgcgaaagccagctgtgccccctgtgattcaggggggcaggggccagtcttgtgctcctggacatgcggtactgaggtgcagacaaggtctccactgtggtgactgggtcccttggccatatcaaggcagcacggcccacccaggcctcccattgccgcaacccctccagtactgcacaaattcctaagggggaagagaaaaggtatggggcggcaaaacctatcatcaactgtccawtgnaatggaacttgctcgggttcaattaaaggcataagttaaagtaaattcattatgatcaacagacctcacntcatctgttgcangatacaactantaaaaaaaaaaaaaaaaaaaaaaaa

SEQ ID NO: 22852 - DNA, 3000 bp, Homo Sapiens
caggccacaccggtggtctgggctggggaccgcgggtcgggtccggtttccagggggttcctggtgctcgaggctggcggcgaggaaggaccagatggcctttgaggatgtggctgtgtacttctcccaggaggagtgggggctcctggacacagcccagagggccctgtaccgccgcgtgatgctagacaacttcgcacttgtggcctcgctgggactctccacctctcgacctcgtgtggtcatccaactggagcgtggcgaggagccctgggttcccagtggaacggacacaaccctgtccaggaccacctacaggaggcgcaaccctggttcctggagtttgacagaggatagagatgtttctggagaatggccacgagctttcccagataccccacctgggatgactactagcgtcttccctgttgccggtgcctgccacagtgtaaaaagcctgcagagacaacggggtgcctccccatctcgggagagaaaacccacgggggtgtcggtgatctactgggagaggctcctgctaggctcaggcagtgggcaagccagcgtcagcctgcgactgacctccccgcttaggcctcccgagggcgtccggcttagggaaaagacactcacagagcatgcgttgctggggaggcagcccaggacgcctgagcggcagaaaccatgtgcacaggaggtccctgggagaacctttgggagcgcccaggacctggaggctgccggcggtcggggacatcaccgaatgggtgcagtttggcaggagcctcatagactcctcggtggccaggagccctcgacctgggacgagctgggcgaggctcttcacgctggggagaagtccttcgaatgcagggcgtgcagcaaagtgttcgtgaagagctccgacctcctcaagcacctacgcacccacaccggggagcggccctacgagtgcgcccagtgcggcaaggccttcagccagacgtcgcacttgacgcagcaccagcgcatccacagcggcgagacgccctacgcgtgccccgtgtgcggcaaggccttccggcatagctcctcgctggtgcggcaccagcgcatccacacggccgagaagtccttccgctgctccgagtgcggcaaggccttcagccacggctccaacctcagccagcaccgcaagatccacgcgggtgggcgtccttatgcttgcgcacagtgtggccgccgcttctgccgcaactcgcacctgatccagcacgagcgtacgcacacaggcgagaagcccttcgtgtgcgcgctctgcggtgctgccttcagccagggctcctcgctctttaagcaccagcgcgtgcacacaggcgagaagcccttcgcctgcccacagtgcggccgcgcctttagccacagctccaacctcacccagcaccagctcctgcacacgggcgagcggcccttccgctgcgtggactgtggcaaggccttcgccaagggcgccgtgctgctcagccaccggcgcattcacacgggcgagaagcccttcgtgtgtacgcagtgtggccgcgccttccgtgagcgcccggccctcttccaccaccagaggatccataccggcgagaagaccgtccggcgatccagggccagcctgcacccccaggccaggtctgttgccggggcatcatcagaaggtgcgccagcgaaggaaaccgagcccactcccgcctcgggcccagccgccgtctcgcagccagcggaggtctgaggtcacaggttgcagccctggccttctgtgaatcccttccacagctaaagggcatatgtcctctgcagatccacagcagagaaaaagtcccgtgcttgctagtcagggacaagggaggccctttggctgtgatttcatttgcacgtggggacaggatttgccagttcacccacagatcacacctccatccccaaagaggtagcactgcagcaacatcagggggaggacgtggtggctgaactctagtggggccgagactattcagagccagtaggaggccgacagtcacagcactgcactgtggtgcggcttcatgtgatatgacagtggatgctaaggtgagagggatgcaggcatgggttgggggtggcccagagaaacttatgacagctgtacacaaactggccgctggagagatgcccgctgagggtattctcccctcaacccactgcctctgttcatccaagacttcctaggggccagcctagcagacaagagaccacaagggactggggatcagggtctgggctctgtcagccgccacctctgggaaagagaaaaggtttgggtccactgaacatcatgtttgtagacgctgacaggtggggtcctaatgagagccaacacatgctcactgccagctcctgtcctgagtactgggaagtttctcctgaagccctgtgagatggctctgtggctggtatcccgacttggaagatgaggaaactgaggcacacggcctggcctggcttcacacacatagccgactcaggagagggatgcccatgggggaacatgtgactctcagcattggaaggacagagctaggatgatggctttccggtggcactcgttcaggtttttgcccaagtctcagcttggccaaggcctgtcactgactggtttaccaaagtcgatgtgaggaggaggctttatacctgaggggatgatgttaacttcagacaagatggagctgctcacttttgccgggtttggtggccacttcacccccaaccctgtctcacccccattatccctcctcaattggaggctggacagagctgaataggaaagacttgctattgcctaaggctatgtgtgacaccctcctgaggacctccccaccccagtgtaatggcccttcatggcagggacagaaaggtggactgggggccatttgcttcctgtggccttcagcagaccaggccctgtccctacctggagcctcacctccaaggaaattc

SEQ ID NO: 22853 - DNA, 2133 bp, Homo Sapiens
ctgagttcctctaatccctgtgttccttctcccccatctttctaaaacccttctctgagagaggaataactatagcttcagggataatatagctttaaggaaacttttggcagatgtggacgtcgtaacatctgggcagtgttaacagaatcccggaggccgggacagaccaggagccactcgttctaggaatgttaaagtagaaggttttttccaattgatgagaggagcagagaggaaggagaaagaggaggagagagaaaaagggcacaaaataccataaaacagatcccatatttctgcttcccctcacttttagaagttaattgatggctgacttctgaaagtcactttcctttgccctggtacttcaggccatatacatcttttcttgtctccataatcctccctttcaaggatggccagtcagctaactcaaagaggagctctctttctgctgttcttcctaactccggcagtgacaccaacatggtatgcaggttctggctactatccggatgaaagctacaatgaagtatatgcagaggaggtcccacaggctcctgccctggactaccgagtcccccgatggtgttatacattaaatatccaggatggagaagccacatgctactcaccgaagggaggaaattatcacagcagcctgggcacgcgttgtgagctctcctgtgaccggggctttcgattgattggaaggaggtcggtgcaatgcctgccaagccgtcgttggtctggaactgcctactgcaggcagatgagatgccacgcactaccattcatcactagtggcacttacacctgcacaaatggagtgcttcttgactctcgctgtgactacagctgttccagtggctaccacctggaaggtgatcgcagccgaatctgcatggaagatgggagatggagtggaggcgagcctgtatgtgtagacatagatccccccaagatccgctgtccccactcacgtgagaagatggcagagccagagaaattgactgctcgagtatactgggacccaccgttggtgaaagattctgctgatggtaccatcaccagggtgacacttcggggccctgagcctggctctcactttcccgaaggagagcatgtgattcgttacactgcctatgaccgagcctacaaccgggccagctgcaagttcattgtgaaagtacaagtgagacgctgcccaactctgaaacctccgcagcacggctacctcacctgcacctcagcgggggacaactatggtgccacctgtgaataccactgtgatggcggttatgatcgccaggggacaccctcccgggtctgtcagtccagccgccagtggtcaggttcaccaccaatctgtgctcctatgaagattaacgtcaacgtcaactcagctgctggtctcttggatcaattctatgagaaacagcgactcctcatcatctcagctcctgatccttccaaccgatattataaaatgcagatctctatgctacagcaatccacctgtggactggatttgcggcatgtgaccatcattgaactggtgggacagccacctcaggaggtggggcgcatccgggagcaacagctgtcagccaacatcatcgaggagctcaggcaatttcagcgcctcactcgctcctacttcaacatggtgttgattgacaagcagggtattgaccgagaccgctacatggaacctgtcacccccgaggaaatcttcacattcattgatgactacctactgagcaatcaggagttgacccagcgtcgggagcaaagggacatatgcgagtgaacttgagccagggcatggttaaagtcaagggaaaagctcctctagttagctgaaactgggacctaataaaaggaggaaatgttttcccacagttctagggacaggactctgaggtgggtgagtttgacaaatcctgcagtgtttccaggcatccttttaggactgtgtaatagtttccctagaagctaggtagggactgaggacaggccttgggcagtgggttgggggtagaagttcttcctttcctaacccgggcccctgcccagctctccaaagtctttcagaaaagtaaatcctaaattcagtgaaaaaaaaac

SEQ ID NO: 22854 - DNA, 201239 bp, Homo Sapiens
tccttgtcccaggtgaaatcccagctcaggtgttatatccttgctgcttctgacaaatgaaaccaaggtgtattaattaaggtaatgctagctactacaataagctgaaaaatatataatagctaaaagctagggtgccagatttaggaaaataaaaacaaacaaaaaacaattgaaatttgaatttcagataaacaatttttttagtataattatgtcccatgcaatatttgagacatactaaaaggttattcattgtttatctgatattcaaatttaacattttcattaatttattttatttggcagccctatggaagacatcaaaagtttatttcttatttatataaagtccaaaatagatgttttttagtaggcaggcagctcttctctaagcgtaattcagggctctgggttctgtccatcctggccctgacgtctttcattgctcagcttctaagatagctctatgctcatggggtcaagtcacaggaaagaaaagggaatgtggagttccacttgggagtttttatgggccagtcctggaagcggcacagaggatttctgctcacaatctattggccagaactcaatcacatggcctgcacctaactgcaagttaagccagaaaaatgtaggtgtgcccaggaagaagtttggggaacagctagccagtctctgccacacctggtaacagcagagtgaatctgtcagtactcgtgcctaatgcgtgtctcatatgctagtgctggattcagtcagcagtcctacatccgctggggtccctaggaggggtcagatgctctcctctttgccctgaactggttagctacttcggactgggatgacaaggccattgtgagagtgataagcaatgtgattcaaacaaattcatttcacttcaattcaatgcaggtttttttttttttttgagacgggctgtcatgctgttgccaaccctggagagcagtggcgccattacggctcactgcagcctcctgggctcaagcaattctccctcctcagcttcccaagtagctgggactacaggtgcatgccaccatgttcagctcatttattttttatttttttgtagacaggaggtctcactatgttacccaggctgctgtccaagtcctgggctcacgtgattctcccgcctcagcctcccaaaatgctgggattacaggcgtaagccaccatgcccagacaatttaataaatatttattaaaacttctaggatattgagaaaagcttggttctaggccactggggaagacatcaactgaaacagcccagttatactctcaattagctgtatacaattaaattcacagatatcctcaacccttatccatatcccattcatctttcaaaggttggtgaaaacctcatagcacaaagaattctgccctaaatgtttgaatacagaatggtcccctctctccctaattcctaaaatatttggtctctatgttcattcattcattcatgcatgcatgctttcagttagttcatcgacaaacatttacatctactctgtttgacagtgtgctaggctctggggcttgggagtggaaatactaaattgaacaagactgaggccttgccttccagaaactcacaaaggagtgggtggtcagaatgcacatgactcagtcagatataaggcagatggtggtaaatactatgataaatgttcagatagtgctaaggggcttatggagaatgggagaaattaaatctgactcaagggtgggtggagaagattacatccaagatccagcaatgacttccagaagagacaaatgaacctggcctggcaagggaggcagagtcaaagtgtctggctcaaagcccaccacagccttggctcacaggcatctcccggtcttccactcactcagtcctttcagggaaaggcactgagcttttctcaagggagaactccaaagacgtctttcatttcatcttacaaatccacacaaatttgcaattccactccacaagatacgagcatttgtcttgctataattttaatatgattggcataaattacctgttatcaagtaaaatagtttcttcttatggcttgtgtgcccctgacataccactgctatttgaaaagaggcttctccagaaactcagtgtctgagagtacgtgactggaaggtgagtgtttgcttaccccttgcgttttctccctgtcaggataaatggaatattctgctttaaggaccctaagtctggcaatatcatgttttgtgaacagccaacacagtaactatggttgaggcctgtattcgatgaatgaggttttcatatgcttctttcacatcaggagagagagagagaaaaaaaaataataaacttggtagaggacgtggagttgtatttctggactatggtggcacctctaaggagcatggttttccttttgcatggctttgtccattactataacactcctgttataaaatagctgccgtggattgaaatccataatgttaactcaaaagttaagcagtccgctattaaacagcataagaaactgttacctatcccctcttcctggccccccaacaaagaaacagcaaactgttaaaaaagcccatgtctccccatgaggacttggggttaattttcagcatggtgtctggggattcatctgtgggactcctattacccataataggactcatgctgcttcatttcatgcacacgatatggaaaatgcacccttccctagtgatgaaattttagttttgaaattgaggctagcttttgcagaacaaagcagattcccagaaacaccaaaaactattcaatgttggcctagagcctgtgtgtccgtgcttaggtgagtatgtgtatctgaaagggagaaaatgccttcctctaagtgcgtatgcccctctcaaagacaatattcaaatatcatgcccgatagctgacagcggtcaatggttgctatgcttcatcccaaagctttgttaggaaccccataaaacctggcacatggtttgtgacacccagtgaaacaccgtgcttcttccataatatcctgagccctgctgcctgtcattaagggacctctcttattaagcatctcttttttaaatggctgccatcatctggtcccagtgtacattaaatcccattataattataaacacacttccccataacattcgttgcagatctcaccctcagtgcctacccccttagggcatctttgcactaataacaactcagatttgctatctgagttgacaacattaggtcccaacaccatttgcaatatgctggggaaagagacagagagagaagaaaaagctttttcttccttaatcacgaagatcttggggtcacagtgacccaaggcctcaggagctaaaaaaaaaaaatccctcctcctacccttttgaaaagtcactctctactctacagatgagggaagggcatacttggcacctgggagagaaactcaagtttgtaaacaccactaaccaggtctctgttggttggggcggtgatggtggtggtagtggtggggtgggggatgagggatgatggcaatcactaatcaaagaagctgtcttatttggtttgctgagcctcaactaaccggaatgcatacatcacctgattctttccccctctgctttttggagggggcatctaaggacataatgtaaaagaattaaaatttaaaaacaaaaacaaaatgtcaacatatgcaggagtaaattccactctgcctaatttttttttttttttgaaatgagatcttgttctgtcacccaggctggagggcagtggtgcaatctcagctcactgcagccaccacctcccaggttcaagcgattctcccgcctcagccccctaagtagctggtattacaggcacgtgccaccacgcctggctaatttttgtatttttagtagagatagggtttcaccatgttggccaggctggtctcaaactcctgacctcaagtgatccgcctgcctcggcctcctaaagtgctgggagtacaggcatgagccactgcgcccagcctactctgcccaattgttgacatcacctacagctctatagtagatgtctggaatgatgatctgaaggactgtaagactgtaagattttttgactccagaaatggacacaataggcttgcggtgtcttcccctaacagtccctggcagggtaaaggtctgatgccctggtacgttccccagtggcaatctggagttctcaactgcagagaatacttttcctctactcaggggcgtcactacctgcatctctccctgaacatgcttcattttccactcatcacaagtttttggggaaatgcaaagtggcatcttctccccaaaaggtagggatctttgatttttttaatcacgatagaaaagtttactttgaaataaaaaaattaaatatatgttccaaattaagagttggaacttaaagagttgcaacattccattcatactcagatactcaaaacaccactgtattcttcttcctatctctttagttgaagtttttttttgtaattcaaagccccctccccaatttctgcctgagattctgagggaggaggaaaagtgtaagatcctgggggatctaagtctctttacctggtgaccaagctgagaaccatttggtcctcagcttggctggctgctgcacagatcttggcctcagcagagtaagagaagaaggaaaattaaaagcccttgcttccttcatctatttcactagaggctacataatctagaagttaagagcatgagctttgcagtcagaatggtctgatttaaagtttcagctctgatgtttaatagatctacagtctgcagtaaggcacttaatctctctgaacctcagttttcatgtccacagaaattgggaaaataatagcacctgcattaataggattgttatgtggattaaataaaacaacataggtaatgtgttgagtttcgtagtcagtgctcagaatgagttattattttcgctgtctccttcctgtatgatctcttagaactgctataccctcctgttccactaactgagctctgaaaggctgccagtggtgggaggtacatgggtaaagagggagatgagggagtaagatttagcaatggaattccatgcaaaggccagctcatctattcctctgtctctagcatgatctccccctaagattgagatctcctgtatttttagaactgatacccaggtttcccttaaaagacgcttcaagaaaaaatgtaaaagaaaaatcactctaaatacacgaacatgagagagacagaaagagagcgggcatgtgcgcgcgagagagattgagtattctcttgtaattttccatcctgcttgtttttaggtgctgccatatgaaatctctgaactgaggagtctcatcagccttcccaggacccaaggacatagctctggctataaatggtgccagttttggtgggggagctgctgctgctttatctgggcccaataaaccttatcaaactgctgtgcagccagccttcagcgctaagtggaaatgcttggagcccaatgctggcattcagcccacagcctcgcctgccttcttcctttttgttaccttctccacctcttaaattcaggcattaatctctctttaacacttactaacaagggctgggcttttaatgggcagcgtttatgaagcaagggagattttcacatagagtgaatatggcacgggggtggggaggccagggccatagaggattgtgctttctctcccattgtttccagagattctctctttctctgatttgaggattaataggagattaggatcaggggttaattgtgtgcttctcctgctactgcactgaggagaggctggtaggtggatgtggacagcaaagcggaaacctacagcaggcactatctaggcagaagctcaacaagtgtagtgattctttcttctgtttccctggtgaggcaccaggagggtcttttctcctctccttacatccctccactcttgctctccttgcagcccagttctttcctaactttctttaaatccctttcctctaacagggtgtatagaccttagttagaaaaacaggtagtctctaaatgggattgctctttattgttaatgaaatgaatacccagggactgggcttcccctccgcttgccctgggtttgatgtggttgtatcccgtgctatcagaggagcccttccttcactcaagtgtgttcccctgcccagctctctccgcagactcctgctgggctgagctttccctgctcttaagagtcaggagtggctcttgctgggatggaatgacccgtctttggggctgcctcatgagcggctcttgtgaacccggatcagttccgatgtgtaaactctaccgcctggccttcagcgaacagatacagatttctgccaccttccatgaccctacagttcatgggactgggtctggggcagtgccagaggcacgcatggaggtgtgattctaggtgagtcctgcggaaaacctctggcccacccgtgagtcacggacagaacatgcagactcgggccttggtgacataagctccgcattgctaaaaccgcgtgacctcgagggctgactggcctgagaaccctggatggcgctctcggccacccccacctcccaccccaacctcctgggcttcggtcagaatccacagcccgtgcccgaagagcgcttcccgcctctggcaccctaccttcgctcagctccagggaaaaggggagagggcagctttctgcagtcagaggaagagtacattttctttggctgctctaccctctgaagtagggcggccagctgaaggaggacacacttttgaggggcccagaggttgtccaagcttccccctgccccctgaagactgtgcactgagctgggcgcagttctcgggaactgtttccacccagattgctggggggcgggggggggtgggatgagggcagagccgagaggctgtccaaggtttgggagagagaaaagtttctcccaggactcgaccttggcctccagcaatcgcgacagctaaaaacgggtgtctcgcttcgacaatagatccccgcggaccttctggcacctggttcactagcgcccgcgaactctgcctcgggagacttattgaaatccggatgctcaagccgggaggcgcgcagtaaccaggaggatgagagggccgggtttgggctaggaaagcggccttttaaaacagatgtcagggggactgcagccccgagccatgagaaaaaagttaaaggcgagatgacacgcactgaattggggcaaacattggaagaggagacaaaactgcgtgcttgagcaccggggtgcggggagggggggacaaaacccgtatccagtgcaaattaaaatcttgggagtaggtgggggctgctgcgcgcccttcaccctcagttcccctattaaggattctgagtccccatgcactcctgtcctctggctccttccttcctctccgctcggccggtgagaggcggccgccggcgccccagcagcagctagatgtcaggcgaagcccggagcgcggagcgcggggaagggaggggaagggaggggaggggaaaggaggggtggggcggggagcgcgcgcgggctcggccagtgcggggtggtgggcgggctgagcccggggacggcgcgggaggggggagggaaggggggcagctgtgggcagggagccgggctcggccgccagcactaaagatggagaggcgccggggccttgcaggggagggggctcggcgttgacgtgggacgcggcggaggcgcagcagccggtggtgatttgctaacctcgcagcagagaggagttgagggcgatgagagcgggtactgcgaactgccgggcgatgctgtcgctgccgccgtgatacggagagcaacagttccccagcaacacccctccccgacacaggcacacaccccccgacaggcacgcacacccaccccacagtgcccggctcggctgcggtgagtgaggggccgggaagaggcgcaccgcccagcgagcgccgcgcgccggggcttcccggggctggagaggtctggggggcgcgcgctcgcttcggccactcggccgctgggcttgtgccttttttatttggcgtgttcccttcctgccgctgcagccgtcgccgccaccggttgggggtcggctagaagggggagccccggctgtcagcctgggcgcagctgcctccccagcccttcctcttcagggcacggtcggggtgagaggtggggggcgtagcggtgtgcgggggctgagggcgtgagcagaggggtcggggatccggaggctttgtaccgccaggggctggcggagcaacagagcccgtgggtgctcttatgtatgcggaccggtgcgcgggcgcaagataaggttgtggtttatttatttgtgtgtttattcgccggccggctgggaagctagaatcggaggagctgacgagtagatctgggggcggaggggagcaggactgggactgcttacgttttgtttctctttgagaaaacgtggtgggctttttcttgattggacttgatccccaccccccttttgcaggggagggagggaagctccagagggtctgcagcgctgcgggccctcctcggctctcggcgggaccggcggtgacaccggagctcgccgtgcgctcccggccgctctcggtgggtgccggtctctgcacctgatgcgttcgggatgcctttcccaccctggcgcgcccgccgctagctcgcacagcgcctcgcacactcccgcacgcgcttgaaatgcgcacggtcccgccggcccgcggaaccacccggacgcacggagcgctccgcaccgactcgctcgccgcctccccgagacgctcgcaccgtgcttgggccgggcgcgctggccgctggcgccgctggccagaggcctgggacccagccggtcgctcccagggggtcacggccctgggtcggagagggagggcgggcagaccccttctcgcctttcctcccacaactcgctgcggggcttttgtgcttccccttcgccgcggggcgggtccgcctcccctgccgctctcgccgcggagtccagcccgcccggactgtcgccgttcctccccgtctctttcgctttccctcgtccctagctcagctctccttctttcaggagtctagctcctcgggaaaagttgcttccccaagtttgctgaagtcgtctccaagtctcggtgggggtcgctgggaactgggggggtgtgagagcgcggtcgatccccggagctcgggcgggttatcgccggctcttccccgcgccgcctggactggacgctgcagccagcgccagccggatcgcgggcgccgagcggcgggtgggggagacggctgccccgtgggcgcccagatttccctcaggacccaaaaagcttgtttcagggcgccaagcttccattcttttggctgttccctccctagttctcagaaaccccgatgtctgcgggaaagcacgcggtggctcggctcggctgaatggtcatcccaaccttgacggcctccgtccccaccccggggcgggcagcaaaaatgtcttgaccagccgtcctgtgaatcctttctgcgtgagcttggtggctcctgaactgatagagctccttctgggggtggaggcaagcaagcagtgttcgaagagtgagggagagaccttgctgttccttgctctcagtgcattcactgcaatattggtcgctgtaagacagacacggggagggtcctgggcctgcgcggtctttctaacactcctttaagcgaggtttggagtctaggagccctcttattgatcccggacaggctctgggagaggcctttgtttcccagccctgtcttcccttcgtactggttgtaactcacaccacaggtgctggtgccaatatcacttccagcgcctctgagccatgtccagcatcccttgctgcccctggtcacaggacttgcagactccttggagcctgtgggacacacgtggagttcacacacccagcccagcatgagcactcctggctgtaggggaccatatttaactatggtctctctccataccttaatgacccatccttcttcgttttttagatcctcctgtccaccgggcagttgtgggcaggagggtaggtacgacaccttacgtaagtgtgtgtgtgtaaacacacacacactttttttttttttttctgagacggagttttgctcctgttgcccaggctggagtgcagtggcgcaatctcggctcacggcaacctccgcctcccggtttcaagtgattctcctgcctcagcctcccgagtagctgggattacaggcgggtgccaccgcgcctggctaattttgtattttttgtagagacggggcttctccatgttggtcaggctggtctcgaactcccgacctcaggtgatccgcctgcctgggcctcccaaagtgctgggattagaggcgtgagccaccgcgccctaccccacacactctttctgtctgtctctggctggtgtacatacacacagttcagattttatattatacatacaataactttgaggcttccgtgggtagaaatgacccaagttagtgtgtgggttgtgtgtgttcctgttagtacctagggatggggacaggccttgggtctgccagtgctttgcagccctgagaacagtagaaggccagaggccaaggctgatggtgagaggatagcctttgcggaggagagcccagtgtccatagatttctgtggccatggctacaggctcctggcctccaatgagtttgactctgcttctggggctcctgtagtgaggcagagtttggaaaaactgtttaaagataaggcttgacatccagggggctggcgtgaagctgacaaggaaggggctaaagtcttgctaattttaagtaagtgcacttcatcataatgaatgttggccttgcctagggagcccctactctcagacacagagaaagctgaggacttataggacttcactacaattttcatttcacttcatctaacagatgtcatagagtagtgaattaggcatctgctgtggcagaaccttctttttactctcagcatccctggcttgaaaggcagatttgtagatttctaggaagctacttcaattaaaatctctaagatcctcttgctaagggcttggcaacagggaggagggggcatgttgtagtggttgaattcttacttttagggacactgatgaatttgtcttttgttctctcatctcttttgcttcttcccctcttctttctcctagcctcctctattggcccaggaagcccacccagccccgccacgcagagcccagaaggaaagaaagcctcatgcctgagccgaggggagcaccatggatctgacaaaaatgggcatgatccagctgcagaaccctagccaccccacggggctactgtgcaaggccaaccagatgcggctggccgggactttgtgcgatgtggtcatcatggtggacagccaggagttccacgcccaccggacggtgctggcctgcaccagcaagatgtttgagatcctcttccaccgcaatagtcaacactatactttggacttcctctcgccaaagaccttccagcagattctggagtatgcatatacagccacgctgcaagccaaggcggaggacctggatgacctgctgtatgcggccgagatcctggagatcgagtacctggaggaacagtgcctgaagatgctggagaccatccaggcctcagacgacaatgacacggaggccaccatggccgatggcggggccgaggaagaagaggaccgcaaggctcggtacctcaagaacatcttcatctcgaagcattccagcgaggagagtgggtatgccagtgtggctggacagagcctccctgggcccatggtggaccagagcccttcagtctccacttcatttggtctttcagccatgagtcccaccaaggctgcagtggacagtttgatgaccataggacagtctctcctgcagggaactcttcagccacctgcagggcccgaggagccaactctggctgggggtgggcggcaccctggggtggctgaggtgaagacggagatgatgcaggtggatgaggtgcccagccaggacagccctggggcagccgagtccagcatctcaggagggatgggggacaaggttgaggaaagaggcaaagaggggcctgggaccccgactcgaagcagcgtcatcaccagtgctagggagctacactatgggcgagaggagagtgccgagcaggtgccacccccagctgaggctggccaggcccccactggccgacctgagcacccagcacccccgcctgagaagcatctgggcatctactccgtgttgcccaaccacaaggctgacgctgtattgagcatgccgtcttccgtgacctctggcctccacgtgcagcctgccctggctgtctccatggacttcagcacctatggggggctgctgccccagggcttcatccagagggagctgttcagcaagctgggggagctggctgtgggcatgaagtcagagagccggaccatcggagagcagtgcagcgtgtgtggggtcgagcttcctgataacgaggctgtggagcagcacaggtaggccccgctccagccccgcacctgatgtaggacttgaggccctcacacccctccttcacaccctggctgctcccaagttaggggcctggctcccctgtcttggcaatttgtgaaaaaaccagaacacttcttctaaagttctggcggggaggggagcaggttttttaaagtgtagtgagggggcctaggatctttccaaaaagcaccaggggacactcatgggcgcagcttcttaataggcccttccctttgttttttgcttttgggcccctgtttgttttttctgctgtttggtctgttctcctttgcttggagtgactgataaaatggagagaaggagaaaaggagtgggatgagggtctcttgggccctgcatctgaccatgttactaggtttcaggtcctcgggttcccatgcagtggtccctgtgaagacagcctgtccctttctgcagcttgggagaatgggagggtctgggggctgcttaagccacaagagcagctgcaggttctgaaccttattcctggtgaaagttaatctccttgctctgtctcccttctcattctctgatcctgcacatgcatttagggggaattgatttaaatgcaaggggaaaggatgggtataagagtcttggtcttgcagcctgtgaagtctcattcttatcccatctctgctcacactgaactaaatgccgcttcaggctagcattggcttccctccggcttccgtttccttctctatgaaataaccattcattgagctcttatgacatgtttggttcagtactaagcactttccatgagttgcattttcattacaacagccctttgagataggtaatgtccttcttttttttttggatgtgaagtttcgctctccttgcccaggctggagtgcaatggtgtgatctctgctcaccgcaacctctgcatcccgggttaaggtgattctcctgcctcagcctcccgagtagctcggattacaggcacgcaccaccatacctggctaattttgaatttttagtagagacgggctttcaccgtgttggtcaggatggtctcgaactcccgacctcaggtgatcggcctgcttcggcctcccaaagtgctggattacaggtatgagccaccgtgtccagctggtaatgtccttcttttacatggaacaatactaaggctcagatgtcaagtctcttttctagggtcacatagatagtaagaggcagagctggattcaaatttaggtccttaccccctggtactttgctgcctcttggagtcacttagacttgaagaggatcatgtctatggaacagagcgttttgaagattgcttataggaagtggagtaaataacaggggggataagtagcgagtttgttttttttttccttgcttctgtcataaaccacgtgcccatcattttatcctctagtttctgggtcagatgaatggagtcaagaaatccagctttctgttgtcattgacgacagcatttggctgcataccctgtggtctgctgttttgctgatcttgggtggattctccacttcctcccccttcacccccattcccctgttgctcgttcaggtacgggggatgtgagtgagaggggttggggtggggatatctggaagttgatctcatcacccctagccggaatctgctctgaccctgcctcctcgacagctcagaggcttaacttgtggaaagtgtggcagagctaaacgtagccgactttttccagtgggtgcgaaaaataaccgccactaaggtgtgtcttcttgatgcttgtaccgctcagaaatagactgaggttatgtttgtttttgctcaaactttcctaaagaggaaacccgctccccaaagttgaccagatagatgtatcatctttccggatgtgaattatttcggctgtgtgctatgagaactgggtatggtgggaagtaattgtttttctggctctcatcaggtcctggttcctggttgcttttctttacccgagagggccacaaaagataccactctcctgagacttccaagttccccttcagcaagaccctcattcctctggggagagagggagagttggccatgttatattcgaaagagcctgggtattggaattggccatatttagtggtgagagcctgtgatacttatttaacctttctgggccttgtttcactcactacatttttttttttttttttttttgagacggagtctcgctctgtcaccgggctggagtgcaatggcgtgatctcagctcactgcagtctccacctcccgggttcaagcgattctcctgcctcagcctcctgagtagctgggactacaggcacctgtcaccccgcccagctaattttttgtatttttagtagagacagggtttcaccatgttggccagaatggtctcgatctcttgaccttgcgatccatccacctcggcctcccaaagtgctgggattacagctgtgagccaccccgcccggccttcactcacttcttaaaatggagacggtcaacagggttggtgctgaattaatgaagtaagatccagaaatcactagagctgtgatgggcacatagtcaccgcagcggtggagaactgaccatctgtcccttgtgttgtttaggcctcatctctgcatggtcctcattggctctgagttctagtgtgtagtgtccacagtgccaccctccatgagggttgtgttgactgtgaggtggtgcagagaatgtccctgtccttgtgagcatatgacagcaagacactggccctggaatcctccgtgtcacatgtgggctgctgacaggaagaatgtgcttttgttgttgttgttgttgttgaggcagagtcttactctgtcgcccaggctgcagtgcagtggcatgatcttggctcactgcaacctctacttcccgggttcaagtgattctcctgcctcagcctcctgagcagctgggactacagatgtgtaccaccatgcccgactaatttttgtatttttagtagagatggggtttcaccatgttggtcaggctggcctggaactcctggccttaagtgatccacctgtctcggcctcccatagtgctgggattataggtgtgtgccaccctgctgggccgagaatgtgcttttgactgagggtggaaagtcagcagctgcagcccaagaagttagagccaggggcagtgcctttgatgggaagcttgggggtctaaagaaatcagaaaggggagaaaataatcctgcgtgtgctcagccctcactcagatcaacagcccctcgggtcccagctagatgtactttgtagaaggctttttttctccccctcaccctcaaaactccaggattaatgtgctattcccttttttctactgttctctgtctccccccaacccatcagcagtctgagaaatgctatggtggaaaaaaaaaaacaacagccctataaccagtacaaacaaaaagccaagacaaaaaaaaaaaaaaaaaaaatcagaaggggagattttgaggccaggaagccatggcattcactggaaatatatcagtgataaaataacaggctacagggtttattttattttatttttaagtcaataggcctgagtgttggtaaagactagatacccagcaatccttcttgcatttcttcttggggtcggggggcagaagggaatggagaggaaatgaaggcggattgctggtaagtgaggcaggaaggcagggagtttattatggaatgtcatcggtaagtttccccatgatttgatcccaagctggtgtggagtgaagggtaagctgttggctcaacagatagtgagaatcaaacttagtggagttgtagatcctgtttcctgcagcggacagcaagatgtacaagccgtccactgcaggaatgacgtgctgtaaaagggatgcagtgtcaagtgtagtcatggatgggtgggaagaccagacaaaggcatccaatgggactgacttacctaaacaaaccagaaggaagtcagaacagtgggaagatctgatagataagcagtattctgcaggcagatgaaggagcaagctttgggcccccaaatcttcaccagtgcatccacattacagaggataatgcctgagggaggggaagatcatctcaggattctggaacactgggccctccctttcttattccaaaaggctggagcagttctgcatgtaggcttctctggaaatggtctaggaaccagctcatccaggccaggagcacctgatcattctcagagttacgtacatatgcgataagattgcagggaacagtatagttctatagacttaagtgtgaacatagtcctcatttatagtccctagtctcccatggctcacgcagcttggtctttatgtgtttctgaatttagtgctgcagaggcacaatggggtctggtttctggatcttatacagacaagcacttaggtcagctgcagtggatgtcctgcacagacaccgtcgcaactcttgcctggttcctttttgtttttggagatggagtctcgctctgtctcccaggctggagtgcagtggcgcgatctcagctcactgcaagctctgcctcccaggttcacgctattctcctgcctcagcctcccaagtagttgggactacaggcacccgccaccacgcccggctaattttttgtatttttagtagagacagggtttcaccgtgttagccagtatggtctcgatctcctgaactcgtgatccacctgcctcggcctcccaaagtgctgggattacaggtgtgagccaccacgcccggcctattgcctggttcttgaagggattctcaggaaccacagggaatgtctgagccagctttctggatccgtgtgtacagcccttcccagaggctttgtggagccagctgtacggtgcatgagctttgtggctaagatatcagagttctgcctggcccttggccttggtctctctcagatggtcagctgctctgtttttagtggttgatcatgtagaaggccaacaggtgttgaccttggtttaggctacttttgggatttttgaggtttcctgagactcttggttttctttcatcatcccgtccagaacctctgatgtcaaactaaattctgtttggaaaagggtatgctgtagaataatgatagccacagcaatgatattaataataccttttatcggttgcagcattttcttctttgcaaagcacctctaatgactttatctctcttgccctcacagccttccttgagtgggtacaggtccataatcccatatctgtgataatgaagtctgaaaagctctgaaaactaaaaagtttgcagtaaactcatttagtggcaaaacctgatctgaactgatgtgaggctatatttatcctgcttagtttgaatattcatatgttttgctgcaaaaatattaatgtgtttgattacagagtgctgccctagactctgctggggctgttaaacacgataggtgtcagagtacctttcttttttttttttttttttttttttgagacggagtctcgctctgtcgcccaggtcggactgcggactgcagtggcgcaatctcggctcactgcaagctccgcttcccgggttcatgccattctcctgcctcagcctcccgagtagctgggactacaggcgcccgccaccgcgcccggctaattttttgtatttttagtagagacggggtttcaccttgttagccaggatggtctcgatctcctgacctcatgatccacccgcctcggcctcccaaagtgctgggattacaggcgtgagcaccgcgcccggcccagagtacctttctaaagtctgaacagttttggtcgttgaagcacctgaaggttttggataagggattatgaacgattatcattctctattgacaaatgaggaaaatgagatttggagcaagtaagtgacttcccatggtcacacagctataaatgggtagaaccaggcactcagcttgccttctaattcacagtcctgggcgctctgcaccaggccatataagaacatgagcattgctcttctgggtcaaatccatctgacctagtctttggttgccatcaccatgcctaagataccaccattggaggctacaaccatcttccttgacgtcaatcctaaaggtcaggtgtagcttctcttagtagctatttatggctgccttgtcattcacagatttgccaaaatcctttttgaatccatttccatttccaggaagtatcctttttaggggtgatgaatgacaagtttataatctcctgggctcctggaaatctggtcttttggagagaggttgttggttgtgaagataggaagatggcagaaggctttgtagtggtgaggccaggtctagacctagctctgcgtttttcagctctgtcaccattgacatcgtttttttcatcgtaagccttaacttcttcatttttaaaactaggcacttcagtgagctctttctggattgttgcgctctttaaaaaattcttttattctttgtgtacccacttatatcttcatgaagtccttttggttaattgaattttgctgttttggaatctggattggcagttcagccagttaagtagggggtcagtttgatttgattctgtgtgttctgactttttttttttttttaaatactttaacctgcttagggttactgagccatctgggatctagactgaactcttggaacttttgaagatgatttcctttattttattttcaatggaggaaagttgcccactctttcatctcagtgagaagtcccattttaatttgccatcactattggatggagccgctaattgctgggagggagaaagctatagtttagcaacatgttttcctcctgctcgttctaggaaaactattatgaatctttaaaatagtgattatcctaaactgttaaaatcaaattctattcacagctctttgatttcttgctaattcaggagagaaacttttccaatcactttaattttttttattaatttaaagcaagccctgctgaaagcccaagtatatatgacttagagtcttactaaatgaatacaggtgtgcctcagtttgtccattggagggtttctgaattttccataactaaagattttctattctgttttggctgggtgtgtggggtgaaagctcttactctctggcagttatttaagtagtaagaaatttgctacaactcttccccacccccacgttttacagataggaaatgagcactttgactgtccaggtcagacttctgattttgctacttactaactgtgacagtggttgtgttacttaacttctgtgtgcctgtttgctcatttgtgaaacagaaataatagtagtacctacttcattgggttgttataaggattcatcagaaaatatttatcctgtgtgaggaacggtggcacatagtaagtgctccataagtgtttgctagggtatttttcttgtcattgtgtgaagtaggtcatgctagccatgcagggtgaaaaatgtgttcatgttggtccagatcctgctttctccctgagaccgttcttccgcataggcgtcaatccgtacagtgctgtaaaactgctgcctcgggcacctcatgtttggggctgagacattgcttctgcgtcttccccagaagctgatctcttgtactgtggtggccagggtactctttgtcccattgacctgaggcctggtgagtcattccagttctcgtttaaatttagccgggcagcgctccactgccatcgggtccaaatgccggggaggctcactgatgcggtgtcctgttgcctgtgcacgtggccaggcgtgcacatcactgtgcttatgagagagatgaagagcacagataccaccttactgatgggggtcctggggctgggcttgtgggtgttgggggttccagagctccttccctttcctgcctgtcagtgcaggatgcttctaaaatgtggactcagcagacattgttttgagtgcttgctacatgtcagattctgtgctaagtgcactcacagccagcatctctgtaagacctctagctgtcctgtaaggtgggtatcagtttcacattctcagatgggcggagagaagcccaagaggttagtggacttttctctagtaaagagttgtacaggccgggcgcagtggctcatgcctgtaatcccagcactttgggaggccgaggcgggcggatcacgaggtcaggagatcgagaccatcctggctaacacagtgaaaccccgtctctactaaaaatacaaaaaattagccgggcgtggtggggggcgcctgtagtcccagctactcgggaggctgaggcaggagaatggcgtgaacccgggaggcagagcttgcagtgagccgagatcatgccactcactacactccagcctgggcaaaggagtgagactgtctcaaaaaaaaaaaaaaaaaaaaagagttgtaccaggatttatgttcaggtcttctggctccatgctctctgcagctgggtgaccagggggctcatggcttcaccagctctggcctcctcagttcctctggtggcttcttgcgaggaggaaggttactgcagagggttcagctctttaggggcccaggccgcatggatccaaggactagtacgtcatctcttaccaacacagagagatcagcttctagtgatagaggccttttatgctgacttgaaaaacagaaaaagagagaaaaaagaaacccatttacaaaaataaaaatcccatgctgttaatttcatgccagcataatcagaaattcccctttctactgtttccccttaaaagccccggtgtccttattatgctggtgcagtctggaaaaactatggttgggttttgcctacgtgaggcttatctctgcagctgcaaggaggggatccggtactttattgtcagcatggaaacttccgctaaatacttagaaaaaccttaattctaaattcctagctcactttcaactgtgtcctcgggacctgattttcttcggtgtgaacagattgtgttcagcattgcagtagaaagggtccaagttaggtaagagaaaggacttcctgagacactggggtgttactgagaaagttgttagaagactgtcacagacattttgatgaaggggggacattctgggccatttgaagtggtttttagagttctttcctctttagggccattcggttcccccagaaataagaagaaaagacatatacacgcacataaaccaccaccaccaggcttgctgagaacaagtcaaatgtgccaccaaaccatcgtcttagtgggagatggggtggcactgcaggggcagaaagactgacgtctgatggacttgggtttgaatactagtgctccatggtgaatttgggcaaatgacttcacctctgtgaagcagcagtatcctcttctgtgaagtgaggttagcccctacctctcaatgtggtttttaaagtatgttaatgagatcacttgtaacctaaagcacacagagtgtgaggccacctccctacttcctgcttctctcatgaccccagcctgacaagggagccgctgagccccctgccaccctcacccggcgttgtgctctaagtggattagctcagcgttgtgatcttaatgccattaggcctgttggcacggctctccttgccatagtgagaagcagatgtggccgaccataatggcccttagcgtgatccatcgggcccacagtgctggggcaaccattattagtgttaatttgggggagctttttatggtagctgggggaaatgtggagggattgttggaaatttatttaagctgttcagcaggttaggtgctgctggggtctactatggcaaaaccctcagctcccccaacccatctctttaaggaacgtccctccccaacaccgaagcccaggcctgattacttccagagttggagagacaacttagcaggctcttgtttcttgccgatgtaccttattagtagcacctggcatcataacccactaatgggaaccagtgctctcctcctgcgtggccagtgacaagtagccctgtcagccggagctcgccgtgcgaggaagttcctattagctttatggtcaggagaacttgtcctgttcaggaaatgaatgttgccgctaaaggtccgcggccctgaccctggcggcataacctgtgcgggccggggagaccctgtgcaggatgcttgggatttcagcccctctctggttcttgtcatatgtaaagagggaatcattgtggtatgttgcagccttgaacttttgatttatgcagtgagggcgacttaaccgtttccatgcctggacggctgtgcagtgacagagccgtgttgtgagcgtatgtgcctaggtacatgtgtgtgtggggtggtcaaggggaaggagagacccccacgtgctagcaggggctgttgctgggagcgggtggatttcatgggaggattccttttcttttttctttttcttgcattcttgcagcatctaaatttcctgcgattgttggctgcaaagtggtaagaagctggagagcattgtgtctggaattgaacctgggttcgaattaatcttctgtctcttagaggctgtgtgaccgtggcaagattcctcaccactcacttcctcatctgtgagatgaagttaataacttctgattcatactggtggtagagcagtgttgttaagtaggtgatgtatagagaatacatggcccagcgtccggccagtggtgtggcctcaggttgtatacttgaaaggatgtgtatacttcagtattttttccattgtaaaattaagggttttttttctttttttcttgagacagagtcctactttgttgcccaggcttgagtgcagtggcgcgatctcagctcactgcaacttccgcctcctgggtccaagtgattctcgtgcctcagcctcccaagtacctgggaccacaggggtgcaccaccacacctggctaatttttgtatatatatatatatatatatttagtagagatggggtttcgccatgttggccaggctggtcttgaactcccgacctcaggtgatctgcctgtctcagcctcctaaagtgctgggattataggtgtgagccactgcgcctggcctaagtttttaaaaattaaaaagaatggcatagtgcttttttgctctttaacagatcaagaccaaaagttttccccccatcatagcccaaagtcctaaagaaaggctacttaagttgttcgttttcttttgtttctcccatgagtaatgtttctaagtgtgatttttgcagagaacagcagtgtctgacctcattcttgaggggaacttttctgcctgcctcttcttgagaaaaaatgtttgtgagttgtctggcaaatggatgcgttacttttgctgctgttgctgccgctgccgttttaaaggcccctggtgacaaaggagtgaactgcactttcggggaaagcatgccggaatctggcccagaaaagaggggccgctgggggaagggtttggagatgacgcctcctcaggaactttaaaagaaatctgtccatctgtctctggcatttatggcatcgttgacagcagttcaaggaaaaataaaaataagttcttatctgattgcggggctgattgcaaagccgaaggactagagtggccagcgagtcgggcggctggatctggagttttggagaaagggccactggctcatttctgggcacgcacgctcacggaggcaagttctcacctcctcgtgggcttctcttcactttacgtggaaaaactgtgtacgtctcaaattaaaagcagctcttgccccgcttagagccggtgaaagctgcttcgaaggcgtttgtagagtagggattggaaatgttcaatgcaaaagttaaatcgtgacagttgtcccctaaatgatctgctaaattaaggatccgctaacatttgtgagtctacctccctgcattccccccacccccacccccgcccccttggcagaagggataaagatggtacctaaaaacaatgtgaagcggctgctaaatcgagtgactctaaaaacatttttctttccttgaagttcagtgtggaaaaccagactggacttgtcagggatgcagacctatatagggcccatgtgcctggcccctttcctcactttctagcacaatggttttcattgccacctctcccgcgcctttccccccttcataattatccactattttactttctgtgtcctgacagctacaagagtagtttttgtttttttgagctgagtagctgctaaatattccccagcagccagattcaacggctgggggggagaataggccaaaccttggcatcccctgttgcaaaagtgaaaaatatttctgtttgcagttaattttagtggcaagcagatcatgttaactggatgtaattgcttccagatatggccgagggttttgtgtgttgagatgaagggtctggtaagtgcttacttcctgtgtaaattagcctattccattcagtctttcattctggccagccctggattctgtcattctgctcccattttccccctccccagcctgcagcctggtgtgagaagccgcttgctatgttcctctaagtgtaattcttttgtcacttggagccactctcctcttggttcttgatgtgagtttgcccttaaataatgagaagggtttgaaaagatgccacctggaccccaggccacctcccgcctctttcccagcaaaggcagatctgaagagcatctcctggtcatgggggttgcatcttggaacccagaactccttgttttctatgcatttttttttcctactgccctctgacccccgactctcacctgggagaacaccttctctttctctcaattagtccgactcctcctcagcctgaactaagcacgttccagtgggtccgaaatctcagaaaaaatgaaacggctgttgcgcagaggagaaggttgtggccacagaaaggagttgcctcatcagacgtgaagccgccaccttgccttgcaaagcaggctgcacctcctgacacacctgcccctccctgcaagaaagggaggggaaatcccacccaagagaaccttctccaggttcctgtgggtttccagggttgcaactgaagaaaagtgttaagattcatgttctcctaaattctgcttttgtcctgtggccagtcccacattcttagtgctatttgcataagaggttgctgtttatcttcctatatcagccccactgataacccctgtggtctgtttaacaacctatgaggagtagattacttgataaatgccagtttttccaatatgcaaagataaactgttggggtcagggtgaggggtggtgtgttatgaaggaggggacaggtggggagccaggaccctcttttagtgggctggagaagtgtgaaagagcctgatgaaagaaaacaggtagcttgtcacatacaacagctgcatttatcatacggttgatcagcttcctgccctcacctacttttctcctccttcatgtggacatgcagagtctctgagaacatttcatcaagtgggttgcctatgcccacattaatacaagatgggaaagggtggaggttatctttgctttttaagttcccatctttttctcccttggtcctctcccacccctacaagttgttggctggtaagcaattgatgctcagaaaaatgatgttcatctgaaatcttaaatgagtggactttttctaccttccctgactttgcaggtgcttcttgaagagccaaggagaaaagaaaacttctgacctcatcacctagtcaataagctgtctgagaaacaaacaaaagagtttagactggctgctaaagctaggaacccagctgatagctttgttttgatgtccttgtaatgtttgcggatcgcagagggtgctatttagagcagggggcatctactgggacagactcactgggaagttgaaacagctagctcaaagtccaagagatgctaaagatagtgaaatacagcccaggaattgagggggagggggttcctcactcaagaaggagactttctaggagggggcgggcgtggtattttctagggacagtatggaatgaagggaagaaggttggctttagaaggaggcaccctgtgggaggctgagacaggtgggtcacctgaggtcaggagtttgagaccagcctggccaacatggtgaaacccagtctctactaaaaatacaaaaattagctgggtggcaggtgcctgtaatcccagctagtcgggggaggctgaggcaggaaaatcgcttgggattacaggtgcctgtaatcccagctagtcgggagaggctgaggcaggaaaattgcttgaaggaggcggaggttgcagtgagcccagatcctgccgttgcactccagcccaagactttgtctcattaaaaaaaaaaaaagaagaagaagaagaaggaggcaccctggatgaagactcaggctccagaatttactatctgtatgtcttgggcaagtggcttagcttctctgagcccctgtttacttttcttttgaaaatgaccaccttgtccatggtaatgaggataaaaaacgtgtaaagtgcatagcagagtgcaggtgtactgggtagacatgtatgattgcgctgtagccctgttatggcccggggagaaactatgaaaggaaccagtgaaatcttttgttttgggcactgctaaattgatgatagtactaaccctgtgctagcagccagccggtgaaataataggtgaataatgttagtacattgtgaatataaaagtttccatttgcaaagtgctactgctgttctaaagaagccacatttctaataaatgattgcttaatcctgtgatgctgccacagccccacagagtttgggaatgtttgggaattctttctgaagtgtgtgccgcattcttttgctttgccttttgggagggtagatgtgactattggaaatggtcaaaataatgcagtagcaaatctgttgactatagtgagtgataagcactgtcggctgctgtgtctgactcggaaggcagattctggaaggggtgtgtggggaaggcttgttggctcagcactggggtgagtgttggcctcacttcttaggtgggaagtggacaaggccaaggggcttttgatttccagctactatggctggactcccagtgaggaaggagtcgctgccatggattgcctgggactgggaagactccttttaactgctgtaatgtttctgcatttgtggtttggcctcctgtgagtttgggctccggggcggcacttctgttgttaaaagaacagaaaagaaaacaaaacaaaacaaaaaaccaggactgtcactgttagatgttggttgaggctagaaagaatggattgagttttgaccccctacaccccagggagtagggaggcctgggaggcacagtggcctgagtttgaattctgactctgcctctttggaaggctctggaaggttaaaggagcttgtgtgttcaaatcttagcctggtacctggcatatactcagcatgtattttttcccctttcctgacaatgttccttgccccgaacacttgaatagtggagagaggaatgtttgcttttcctctccattgaaccaacactcgcccatccactgagcccaagattcaccttaggattgtctgttggactcggctcttttgtgacctaacagtgcaggggccttgtgctgagctgcacatgctcgctctcgctggtgctccctctctctctctctctctgtctgcattatttatagtaaaccatattagaacagagtgttaaagaggaaggatgagtcattcccattgaaaccattgatgacataaataaaagcaaaatgcttactatgtgttttgtgcagtatttaaggccaggttgtgctaatttgaatgctcccaaactggatctgtgaaagcatacatatgtgggaaaaaattcaggtttaactagagggaagttatttattgaaaatccatttcagtatctgctttctcccttctatttacttcagatccatattcatatcatgcttgttgttctggctaacgagagggactggcttattcactagctaaggtttgtttattttcggaaggttgaggaatagcacagagaggttgtctaagtgtccctgtctccattcctcctcttgccacctgttgaggaaggcactctccacctgctttgcaggcgtgggctctcaatgtgtccaagaatcacagtcagagctgaagggcccttggaatcatttattgcagcatgctcatttgggaggagtaagtggaggtccagagaggttctgtgattttccctaggtcacacagcaagctagaggcaaaaccaggaccctcactcccagcccactttaattcttccttcacaagcctgcctgtgactgcccaggtctgttctctgcttctaccaaggggtaggcaagactagaatctgacttgagagcagtttcagatctttgtctgtgagggatgctggggggtttctggcatggtgacttgcctcctgggacactcattaacctctctgctgctgagcctgagcagactaatgtacatcaactccttaggatttacagacaatgccctatgttgggggttttgagacccaaagattgctaagacatgggacttttccttgaagagcttatactttgagttaaaatatgtatgttgatatctatgacagagaataggaaatggaaagactatgatatatatattcagagttgaaatgacttctgtctggagtgattcattttaaattttaaaaccttgttgagcacttactgtctgctgggcacctgggtaggccctgggaatactgtgatgagcaagatagacaagacgtctaccctcctggggctttcctaatggggaagaaagatccttacttagctagcagtcctgtccgtaactgtgtaagggtgattttgatacatgttgggagcctggatgaagcagcacatgagtaggatattaaaggataagtaggttttgaagacggggacagaaagaaggaaaattgtggtcagggccaggggagaaaacaaggagtaactttctttggcaggaatgagggtgattcatgctggaatggtaggctggggtcagactgtggtgctataaatgcggggagagagattagagaaggcagcatgaagaatggagagaaaatgagtttgaagttgagcagacccgggttcagattttcatgctgccacttgcaaactgtgtgatgttggccatcaaggactgtgaactggctgggtgcagtggctcacacctgtcatcccagtgctttgggaggccaaggcaggaggattgcgtgaggccagaagtttgagactggcttgggcaatatagcgagacgatctttccaaaaaaaaaaaaaaaaaaattaaaaatgcagctgtgcatgcccataatcccagcttctcgggtggctgaagagggaggatggcttgaacttataagttcaaggctgtggtgagctatgatcacgccactgcactccagcctgggcaacaaagtgagaccctatctctatttcaaaacaacaacaacaacaacagcaacacacaccatgaactgtagcttcttcattcctacagtgcagttattgtgtgggatagcctgaggatttggggtcgtgtacttaacacactctgcacagtgcctgtaacagtgtagttgctcaataaatataactgctgtttgttttaactgctgtttctttttggactttatcccgggagagttggagccttggaaggcatttgaaaaggagagtgacgtgactggagtgctccatactgatgtgacatccactaggcatgtgtctgactgccccctgctccttccctgccttcacgagcctgtctgaaaaggagtttagtgcgtgatcatcagctcctaaggagacctctcccctgtatcttgtacctggcactctaccaagatttgatgaaaggacatgaaatggacccttgccacctctcggtgggcggggaagctgggagaggggcctggggagagggggtcttcagctgtcaggatcaaaggaagtgacactctgaagctggtctgccggactgttacccgtctctctaactctcttttaatagaaacccagtctcccctcttgcctccctgatagtgaacagcgacgctatctcccgcgggccagtctcggctgtggtcgtagcactacgcaatgtctgcaaaccgacagtggcatggggagataagggccccaacgttgtgtaacgaggggcatgggctgtttgcccgagtggctcctggcccctgggtaactgctaacctcaacggaggagcgggccggccttggaaacgccgttccagggcccctcgctggttccacggatgcctttttgtggttggataaaggaagctcatgtaggccgcccacagcgcagcatggccttgggctacgggtgtttggttgttttgtttttctcttttctttgtcttttttaaaaaaagaagttgaaagggggatagtcttgcttggcacctaccacctttaacccaaaaccaaataaaacaaacagttcctaaatataaattaaacttcaacctgcagtatagacatcctccttccctgcccgaaacccactggccactggaggctagctttaagaaattggttttggagactctggcttgaaaaggagccatgcccacttgtctcacgtcccagtcgctggctccagggggccgtggtagaacatatattgtacttcagctgcctttcccctccaagcttcctcagccacccacagccctttcagatgagctgagccctagcactgtgccctctcccctctgccctcttagggtgatagaatccactaccctgacatctggggttgccctgttctgctgtggtgggagatgggctggaagggacttcggaggctctcccgtgttctgtaccacccagcttccccttggatccctccacccccgcagccaggagagggaagtaactgttctttgagcaggacatttcattttcaaagtattcttgatgccgcccccccgccccaccgccaagaattctgctctgtgggtgatacttataaggtaactatatggcttccttatttaggcagcagtttctcttctatgattttagttcctctcatgattcttataaccctctctcagatacttccaggatgataaatcttctatcactgtttcatctgatcacatcagggtgattatatttcgtgacataaccaggtggctttaatccgttggtggaagaaccaggctctcacctccattgtttaagatgttatgtttctactaatctgtccactgagtgtctccatcctattgtttccattgcatgctctcaggttatttcctttgttcttggctgtctgattgctcccagaggctgcagttattttattttatttatttcattttttggtgggagtaggggattgatctctctcttgcctttagcttgaatgggtggtcatttccaggcttacacattgctccatgcccactgtaggggtctggcttagagatggtcgggggagagaaggtggtgatttaaaagatttggaggcggtggcttacattgattttagcttatctaaccctttagctagaggctgctcttccctcagagtgtccaactagctgtaacttaaagcaacagagaaatgtatatcatcccttttcttgcattaattagggctgagaaattcattatttagagggataagagctccggaggaggagggttttttgaactaatgtagagatctgtggccagctgtgtgattctcaggtagcaggtgagggggtgggggttgatgagaggggtgagaaggagcaggtgccagggtcaggcaggggagggagcccccactccgtgcatcatcccagagccctgttcctccaagcccagattagacacccttctccacgtggggcctcaagttagaaatcctgggaggaggccttattgctcaggatcatctgggaatgttgctttctgggtttaaaatacagtcaatgtttagatgagctgctgttcaggcacatggtctggttagcaaagggttaaatcctgcatcccgtttttagtcatcaagctagctcagatctgcccaccttggagccctgtgctttcctgccttagtgggcagagtctaggggacctgtggcatgttcaatgattgaggactcttgtccagattccaaaaacctactgtgatgatgctgttctgaagctgtggtaggcggtgattgagtggagtgtgtagtgaccctcaggaattcttcagaagttaggattttgacgatacctctgataagttgggtttttaatttgctggtttatcttagagtggaggctgtggcccacagcaagtagtacattttccatctcagcccagtgcatggacaaacgtacctcaaaccaaaggttcaatgaagctctatttatctttactatatgctctggtatcttctcttccattctatcttatttcatttaagaacgttaatgaagacccactaatggattgccacccatggttcgaggaggtcccccaaacagtgaggccttagccataggtattcaattcaaaaagcatttactgagcatcactgtgtactaggtggttgctaaatgctatgggggtaatgcagagaaattaataaatccctgtaagagttcactgtaaaacagaaatgacagccatatgtgtatgactttgtgtgtgtgtgtatatatatatatcagactgtatgattaaatattatataagtgaggtatgggggagcagaggagaggaattgaattttgaattttgattgaagattcaggagggcttcatggaggaggtagcatttggccaggttttagagaatggctaggctttggacaagtggagacaggaactgccatttggaggtaggagatgagctaatgtgtggcagtgtatgggtgggggcaggtgcctgtatacaaggtagtgtgctggaatggggcgatgggcatggggtaggatgggagatcaagcagggaaagtggattggggccaggtcctagaatgatttgaataccaagctagctttctggacatttgtaaggcgcacttgataggggttggatcattgcgatattattggaagacaaaactggggagggtgtgagaccatgtggctgctcagaatgcagagcccctctgatgtcctcagccttctacgtatttagtgatgggggtggtggtggtaaagagccttgcagacagcctggcttgggtgcttgcttgaagttcttacgcccactaactcctgccctgctctgtggagcctgctgaatggggcattaggctagtcacacacctgtcctttttcacattcatgctgtaccctttgcaaacattacgcagcagtgcaaactcagccctgggcctcagaggagccaggcgtggccaggagagtgggatttggaacggaagtgcttttgtttttggcattcactactcccccacccccactggcacttggattgtccttctttttctccttggtgtctctcatcctgtccagccttcaagacctcctcaagtcaggcttctctgggaagcgctgtctgtctgtcttggtgcttgctggcttcctcttctgtctcctgtgccatctccagtttgcaccatttgagtataagctctgctgcctcatttgagtttaagttttatccccccagccacaacctaagttccatgaggatagtgattgtggtttatcttctctccctcagctgtctgctgacaccatgctgaatacatagtaggtactcagtaaataatagctaattgagcatttactatggacaaagcactttacttgcattaacacatcccatcctcacaaccacctgtgaggtgaatcctattaaaaggaatacttgggtgctttcagagttattctctccagctttggacttcttgtttcatttgccctgagagctcctcaactctgttgatgctgttctttcaaaggttgcttgtgacctcttagttctcaagagcactgtattaggttggtgcaaaagtaattgctattttagacattactttcaatggcaaaaactgcaattacttttgcgccaactaatactttcccagactccagtattggctccattgacccctcctgttcctgccaacttctccccctcctcctctggtatttcctggaactccctccctagggtcagtgccatgtggtgcctggaactccctgggatctgtgtttgaatcctgacattgccactttctaagtggcaaacactttggccacctccccctcttcctgagtctgtttcatcatctgcaaaatgctggtagtttctcttctcacaggaaagatggtggttgttcatcgatgtctgttgaaaccgtgaccctctctgctgaatgtagaagaagatgaccttaccagttctcctgtctctccagtgtctttcttgacaatcttgtggtttccacaagcaaccctctgtgggtgatttccagatctctacctctagttgtttttcgttttttgtcttttcttgtgtttcacacattcttttccagtagcctcacgggcacaccagtcctgcaaggatctagaatgtgatggtttgagctagttcaacaccttcctctcgaatcgtctcctgtgtcctcatgttttgtggtctctgccctcttcccaggcacccaactgcagactttggcatcatctgtggctcctgtcttccctttgccttccatatccaccatttgcctctccagcctacttaaccagatggctgtcctgatttcctcaccagccttcctgcagtgcacccctgcaaggctcatcaccccacttccctgagcagagtagggctctgatggggttgctctcctgctctgaaccctgcagtggctcactatggcctattctagagaagaaacgagagaattcttagcgtggcattcaaagccatccgggatcctagattccagctacattttcactcttcatccctttctctgcatatttcttagaatgtacacccctgaaggcagggaccatctttttcacatctgtgttacaaccttttagtccactctctagcatatggcaactcagcagatgctgctgttgagtaaactcttatgcttcccttcccatgccatatccttctctggtcatcgcaacagggccaaatctctcatgcttcagtgtaaatgccctctccttgcagcatcctttcctggggcattcttcctccttgcatccagttggaaataatatgtccctccattggagctcccacaccagaagaggtatagataaagccagatacttctttttttttttttttttttgatacagagtctcactctgttgcccaggctggagtgtagtggcatgaacttggctcactgcagcctctgcctcttgggttcaagtgattcttgcgtctcagcctcccgagtagctgagattacagacatgcgctaccatgcctggctaatttttgtatttttagtagagatgcggtttcaccatgctggccaggctggtccccaactcctcgcctcaagtgatcttcctgccttagcctcccagagtgctaggattacaggtgtgagtcactgtgcccggcctggatcttttattgtttgtatttctgttcatttcttccctaagaaaccccacgtttttgtgggcaggacctggaatcctattcagttatacagccccgcttcgtccactgctccccttcagagtctagtgccctggacatcataggtattcagtacctcttgctggcttaggaacaggaggatgcctgatggccagggtgttcctctgaagcagtggtggctgagctttttgaatatctgcattgtgctaagggttaactacccaggcagtactggtggggaagggccccagaagcaggcccagactcaggtattgttaaagcagagtcatctttgctctgaagttttttcttttatcttttcttttcttttttaattgggggaaaccttgtcctaattggcatctttattgtggcaggaataggccaggcagggctgggggagtgtgaagtctgtgaagggaggtggcctgggggcccccccacacaatgcctgattgtgcaggcataggtatgaacacattgcagcctgtgtgcacccacagggtgaccacgagcaaggcctggggacgaggactacgaggcctgcagctgggtcctcttttctccctcctcacccccacccagtacccacgtgattgggccacatcccagtaacaagcagtccttgtggaagagccttcatgaagacctttgctgggagtggcgggcagggatctgcggggagcgttgctggttcaagctggggctttcctatggatgatgtcctgtgaagggtagatcctggagggacagacaggtgtctgatctttggcaggcagggatgtctcatttgtacattataggtattcagtatctcttgctggcttaggcttcataatgtctcatttgtacatcatagccttcagtacctcttgctgatttggttaacccagttgttataccacgatattgatttttcatgccattttctttaggaagattggaagatcattgaggatagggactgtgaccttttctttttttctaccccagtacccaacctggcaggtagcacagcgcaatgatccacgatgtttaataggttgaattgtagagggggcctctgattccaaagatgggggcagaatatcagtcctctccagactgcctgggaatcctcctctctccagcctgggcctggccagtgggagacagaggctgctgaagtagctggcaaggaggcaaagaagatgatgacctagctacggtcctcatgtgcccactggggaatcatctttttgcatctgagttagtcaatgtgctgtgcattctctgcagaatttgtgaacctggtataggtatgaggtgagagaggccaggaggtctggctgctccccctctagacttcgcaggtaaaacccaaggtgtgtgccacgtaaaggttcagaggttttataggcatccagatagcacatgtgggtctctgcccctgcttgcagcctccctggggcagccagccaggctcagggcaggaagctgctgattctgggtcacttggctgctcttgcttgctgctgctgtgattgttcctacagttaagatcttagctccataagggacatacggaggtcatctaggtcatctcatggctctcaggcaagaaaagtagcattattgctctcatgcccactttatggataagtgaccgaggcctgcagaggcagagtggctattccagccattaaatgtggctccctgctattctgttccctgccaggatattctgtggatggttaggggaggggtcttacctcagctaacgaggtgcattttctgtggggtgaggccattcttgtcacttaggtgtctgaggcctgatggtgttggggaatgtcctggttctattcccagggctgtaacgtgggggaaggatggaggaagacagaatggcctctggaacttttggatctttctgagttgaggccttgtctggccaactccgggaggctgctggcatggcaagcagggtagggatgcctggcctagccaggggagctccctctctcccctctgctgcccctctttccacccccatcataaacacgtgtggactttctggtggtgagaagatggttttggagggctgggctgaggtctaggcaggcaagagcttccaaatgtgtggctttgattctcagccttttcatccctcaatcctgggagactcattttaaaacttaaaaaaggacttcattctattggatgctatgtgggcaggccctgggctgttgtagagaggcctgaaacccacttcagtttcctggacaggctgggagtgtgtacccatgggttccctgctgccctattcctggaagacactaatatccctcccaaactcttggttggtttctgctttttttctgtagcattttgtctttgtgggaaattttaagaaacatatgtatggctttttggtttccacttatttattttcccctctgagtttcagatttcatccttctccaccccttccccctgccctaaggtggggctagtgcaaatcgcagtgtgtgtgtagtgggatggttaaagagccgtacatcctcacacctggtgacgcagactaaggcaattaaccttctttagtaaagaccctttcagctgggtgcggtgggaggcacttcgggaggccgaggtggaaggattgcttgagccctggagttggagaccagcttgggcagcatggtgaaaccacctctctaaaaaaatataaaaattaacgggacgttgtggcatgcacctatagtcccagctacttgggaggctggggcgcgagaagtgcttgaacctgagagatggagactgcggtgaggcgagattgcaccactgcacttcagctaggtgacagagtgggaccctgtctcaaaacaaaacaaaacaacaacaaaaaaagcatgttttcctgtctttcccttcctctcctccaccccctggcatgaactctcaactcttagcctgtggatgtccgtttctataaatgctggtgctcggtggtcaccgtagacgtccgagcagcccctggggctttggcttgtgttttctctgtacttgtgagggtggttgccacttctggccttctttgtgctttctttttctttcctttccccaatcttttgttcctccctccctccctccctcccttcctcccttccttccttctgctttcctgtttaaagtatatggctgcacctagcatgacacagttcctatttattcctcagacttgctgggacagtctcctctgtatgcggcgactgagggtgggttccagtgccccagcccactccccttccccttgtttttgtccacttggctggacaaagagaacaaaaccaaatggcctcccctccccctctcctaaaccggtcaagcagtggtattctgggatgattttccctgcaaccatttaaacaagtgctttgatgcttacgagtcattggaatgaccaggcctgtgcgccccttctcactgacacccttagaccaggctgggcctcacccttttgtcttgctgcccctcggtgcccagtgggcgtgggcagtaggactgagcagaggggccgaggctgtgctggccggcagctctgttacagtagagtggaaggaggtcccggccagaggggcaggtcaaacaggcctcttttatttacagtgctctctttcacggcctcactgaaacaggagacccgagaggctccggtgaaagggcactgtgtttgtgcattcaggccttccagggctggctacaaaggtgggggcacccggagcactgaaggggctttttgtcattggcagtttggcttaggggagaagcgagggagagccagtgtgggagccgcctctaggattgtgagcaagtgcctgtttagacagctccacgctgctccttaaaacctattttgtggtctggggttggggcgggggcacactgcctcgatcctcttgttgtgtggagcaaagtgattcctctcttcttgtgttctccagatggttccgttgtcctcacatccattgtggttgaggatacagtgcagagaagaccccgctgtcctctgctccccctccttttctctccaaagagaagtttcagggacagcaatagacttctgtggggcctttgttccttgtagctttcatttttcaattcttcttctccctgtattatcttgctaggccttagtttgtgcatctctaaaatgggctgggaggtgctagcccatacctaatatatagggccgtcgtaaggcttaggtcccataactcatggggttggcttgcacagggctctctcctttcagactggtcaggccatggtccttttatgagtctgaagagccaaaatgaagacctcactttctagtatccccaatcttcctcccacctttccctggctcttgagggttctttgggcatgttcccctctggtctccattattatatagggaagagaaattttccagaagaatatttgaaggattaaagtttgaggttgtagaatatgtgaaaacacacacacaccacaccacaccccaaaatcacccttttaaagaagattaaaaaaccaccagtgcctgtcctacattggtaaactctggcaagcctcataatgttgactttactgacctgcctgacttcagtggccgagtctacatggggtgttaaggccccacgtgtttttgcctgtgccctttaattgtatcttcaggaccatattttcagaaccagaaatcacagccacagtttggcagtggcacagaatggttcaatttaggcctatcccagagaggcttgggttgtctgtgaagttctgggtggtctgtattgtggagaggtgaacaccgtattgctgggggtgtggaggggggatgttgctgtttccctgctacagaaaggccaggcttccttttcagccttttgttccccgattcccctctcttcctccactacactcagccctgctgctgcttccaagggacaactccctctcttgtccttgcccatctttgagagaggcggtgaataaacaccaaggcaagaagaagcaacgggacccctagaaggagatgagtgtgtggcccaaggatggtggagcattgtcctgaaaggtagaaccaagactatagcctccgaggctctgtttaccatattcttggctcttgtgccacttctgtgtccagcagctggagcttgtagaagaaagatgggaaagacatagtacaggaaatgttcccattcagccagcactgatttatctgctgcctggtttctcaggaggcctaatctgtaagaacagtcgagaactttatttctgccctttaacctatgtccattttctagatagtttctaaaaaaggcatcacaccagctctttgagacaacatgtcatatgcaactgttggttttgggtggaatgaaactgaattgtcaacggacattttttctttctgtattcatgtgtttggaatagtgacaacgtcattggttcagactttgagcccccttctggttaggctcttcagtataagcccttaaaaatatttttgacttttcagggccaggcgcggtggctcacgcctgtaatcccagcactttgggaggccgaggcaggtggatcacgaggtcaggagatcgagaccatcctggctaacacggtgaaagcccgtctctactaaaaatacaaaaaattagccaggtgtggtggcgggcgcctgtagtcccagctactcgagaggctgaggctggagaatggcgtgaacccggaggcagagtttgcagtgagctgaggttgtgccactgcactccagcctgggagacagagcaagactccgtctcaaaaaaataaaaaataaaaaacattaaaaaattgactttttgagtaaaacaaaaaccaaacgagtccgtgtaaagtctaagatgttggttcatctcaacattgggatattggaataggccactttggaaggtttctctaattgatgaagggcatgggccaccccatggattgcaatgctgtggctgtttgggtggcatccagcttctaggggatggtggcaaacttgggtgtgcaggcagtaggaaggaggaggtagcttccagagagagccattgctggggctcaagaagtttctttctgggctcaagcatggttgctagtggtccacacagtgctttcgtgtgaattagaaaaagcacccttgttgtggatggatgtggctcttaactagggtctatcccacagtgagctggttggggctggatctcaaacctctttgcccctcaatcagaggcaggaggtccctggcccaaggggcttccatggttggagtggtcgtcagccgaaagctgttctggtgagatgttttgagctatcagttccaagtttccaaaggccaaggcctctgggatcagtttcactgatccttcaaccagcttatgtgccctgttagcccagatacccctccagagtgcttcgcactgggctgcaggtcactgtggccccacaccatagaagctgggggcctgtctgcatgttctggcatccataaagctgcctgcaaacgtgagagggggtttatggcacccttttagcatgactgtctcttgtgaccaaggccaagaaaaatagcacaaagatgtaggagtggtgaggaatgaagatgcacgtgcacgcgccctgcagtctcagtcaatgcgctctttagggtttagtttggaaaaccacagtgtcgtgtcttatgtaaccaatttcttttcttttcttttcttttctttttttttttttttttttgtgatggagtctcgtgtcttgctctgtcacccaggctggagtgcagtggctcgatctcggctcactgcaacctccgcctcccaggttcaagcgactatcctgcctcagcctcctgagtagctgggactacaggcgcccgccaccacgcccagctaattttttgtgtatttagtagagacggggtttcaccgtgttagccaggatggtcacaatctcctgacctcgtggtccgcccgccttggcctcccacagtgctgggattacaggcgtgagccaccacgcccggccaccaatttcttatacataggttatggagcagggagaaagagacatgcaaacaaggcagaattgggacctttgcaagaagaccttcttcactcgcccactttctcatacttttagtcaccaaggcagggtctttttaaacaacttcgaggctcaggcctagggggttaggagagtaaaccctaaatccctttcaccctagcatgcttgggtgccgtgttgacaaggtctctgaagtgcccatgggaagcagaccaggctctgagaataatttccatggaattaattattgttcttactccaatagatttgaaatctatttaacttttcagggtcccctagctttttaaatgtttcaagtgtattctctctgataggttgccttttctctccctgtaggctataattagtgtcctttacacaaaattggcttagaattggatttagagaagataagaatcaaattaccagtatttatcttgtaaattccaaaagatctacttaagacactgtattaaaaaaggagtataaaagaaaagtttattctatgaaaaagtaaattcctcatggtctgagcaaccaggggtattttaatatcaaatctccagacttcccttggaggcacctaaaattgccttttcccttgtcgctcgtttttatctccagttgagcttctgaaatatgttgccaggctttggatattggagagctggtgtggtttcagctttcattaaaattcggaggttttgacttatctattatttctgatttgtggtaagacataagcctctaaaatatgctatcttaaagagatacacacaaattttatcttagcatgttaagtttttaagccgttgagagatggcagaatagacctctgtggtctcctgtgtgcttcttcgtcctaaaatgtcagcatgctggttttcatgtgctgcctcgtacagtaagtccccagcagatttaaataaggttgtgtcaaaacatatgcctatgttttttttaacatcgttgtctcataagtgtgcagtaatggcatattgagactgttcatagactggtcagctgcatttcctgcagccgaggaaccctttattaaggtgcatttctggggttgaactaaaactgctcacccccatcaaatgaggaaacttgaggggtttgcagcccagcattttacgggcacttttgcgactgtgtacccttgcgtggcttcccgcttcagcgacattgttgacttcagttttctaatctaattctttttttcttttttggttttgatgagagtgttggataccaaagcacaaacgatggattccttttgaaagaacaaaaacatattttgtgagcagttttacttctgggagtgttatgtgtatacacacacacacacacaccctaaataattgaaagcaggaacttgaacagatatttgcacacccatgttcatagcagcattagccaaaatagccaaaaggtggaaataattcaaatgttcattgacccatggataaattgacaaaatgtggtatatacatatagtggaatattattcagccttaacaaggaaggaaattctgacacatggtacaacacagattaactttgagggcattatactaggtgaaataagctagatagcaaaggacagatagtgtatggtgccatctatatgaggcatctgtgcttatataaagcaaatttgtagaaacacgaactagaatagatgttgccaggagctggggagagaggggaatggggagttaaggttgagtgggtacagagtttcagttgggggagatgaaaaagttctgtggctggatggtagtaatggttacacaacatcaggagtgtactaaatgacactgatctgtacacttagaatctttaaaatggtaaattttagttacatagttttactacaataaaaatgtattttatgttaattgcaatacttggcatttgagaaaaaattcttagaaaatactgagaatatcatactgataaaaaccctctgctaaattttttttaaaaaaaacacacatcgcctgtactcctgagtatcagcgatcagtctagcgttgccctttaactatcattattgttattgttaaagtgatttttattaagtgctatctctcaagtggtatgattacttgttgaggtcttgtgttggtatttgtcatgtgattctagaaaaatctccccctttttggctctgagacattctctagttgacctcttcccagagagaagttaaggaaaatcttccgctctgatttttttttctttctgcacttaaataattaaataatatctgtggccttacaacacagggaggtttcagtgaggaagaaaattcaactgcatttgcaaaatgtctgaaaattatgggagagatgtttctgcttttagacttggtacgtatgtggtcaggttttcagaggttttctattcaccatctgtgacgggccttgtctcctcctgcaactggtggcagatgtagccagagattttgtgagcttctcaacagcatctttttcctgctcttcttcccttcctctttgtttggtttttattcacatgaaaatttaaagacccataaggaaattcaaagtgaaaatctatgcccaaataagtcaggatctcaagatgaaaatataagttctggaaatggaagtttcctctgcccccgtggtggtatcatagccagcagcctcgttctgtgcttttgaaggtttaatggcctgcatgtgaaggtaggggcgcactatatatatagtaccaggcgtgtgggcgcactggcacggatctgaaaaagcgtaagtttggcatttctaggtttattttaaacttacaacctttaacgccagacacagagcttctttcccacttaatgtaactatacattgattgcttttaattagtgttggatcttttttggtgttttgcagcttgggatatataaaaagtctgacttaaatttaaaaaaaaaaaaagctaactcctgacattctcacgagtcttgcaaaaaccagcacgggagccttagaaattctaacctcctcgtcctctttatttttatcttgagtcaggtgggccaagaagcaagggaagagtccaatataacatacttaatggatggaggtaatttccttggactgttttggcagaaattaagcatctgtatttagataaaggtagtggtgggttggattttcatagcataagcatagttgctgaagatcaataatatcaaataatgggttcttggtgagggggaaaggaaatgggggaggggtcttttcactcaacagtttggaaatgctaatgattatttgtggttttcagcccagaattcttcatatttgcttgcaagcttctatggcactgccgaattctacagtaaatatttcggacatcctcagccctgttctcctttcccttcagtaaattacatattaaagtagcctggtaactgagcactggttgctgtgagataagggctgggaaatcaatatgtttgccatgtggctgcttgtttatgacacctgcctctagaacagttgagcaatgttctgtttgttaaagctgcatttcagaagcttgtatcctcctaaaacaaccgtgatcttactgggggagagagaggtgctacaacagatattgattttagtttttctaagtatggaattacacttctaaacagtggtcttacagcctgtgattttttccccatgaggaggagatgtagatactctgaatatatatatacacatacacacatatataaaataaatctattttataatgtttatgatgtggtcagttaaaaaaggagtgtagtttataataaggaagtgtaggtattatttagatttatctcctctcttggcacctggcttaaaaaaaaaaaaagtagtaacaagaaacatagcagctgctgggaaacatgcattttaatctaagtctccagtgtggttttagtttaaccagtggatgatactgtagtctcaaggcttagcctgctggtgagtcaatggttcttaaagctgtgtggtgtcagctcaagtgagcgaagcagtgtgtggtgtgtgtgcattggagggtgaggggtatgaggaggtagtcagccttggagggagaagggagacaggctaggtcttcttcacgtggccttccattttggaaaacagaagcgatgatacaacttctcttcttgcccaagggattcagtagaaaaaaatacatttccaaacacattgcgctacagtcattgaacttcaaagtgtaaagcatggattgtgttggtgcacttgtgggtgcccatgacacacactcttcaatgctcctgtgccttcctaagaggtgtctgtctttctcaaccccagtgtgtgtcctctgacgtctagtggattgctgcatacacagtcaaccctccttaaaaggtttaaaaagaaacatgagctcccttttagagcaccccaaagcagctgcattcttgagttggtgccctgcactgggattcccatggactgggaacatgatctcttaatgacactaatatattctgagatctgattttttgtttgtgtgttttttaacccaggttggcaggttctccttaatcagtagtggcaaaatgtctctttcctttctccacgtaatgctaaatggcttatccagtcatctctctctgctcatggtcagcccgaggtgacagttaaaattggatggaggtagcttggggtaggaagacttggtgattttggcggcactgggtcaaacccagggaaactgaagctgtgtctgcacagctggttgaaaggctgtgttgtgatccagggatttaagtaaaaatattctttccttaccaccctctatgccccctactccccagtaatatagtaggcatgggggttgacttattttgaggggactagtatgtatttaatatttcatctaatttttgtagccctggcctggctggatgacaaaagtgtttaaactaagaccgatttgagcaagtattttatcctccctctcgggagactatgggcatagaacggtgtggggatttggaggtgctggcaagtctggcccctttcctcttgcgtttactcaggcacagatggaaaaagatgaaactcaatgaggacccttttgtgagatgcggcacatttcgctttgtggaattattaaccttttataagactgggatacttacaaacttaccgcaggaccagacagtgactatcagaatcctctcttctaaagatcagcgatctacagctttcgcaaaacttaaggctgacttgggaatctagacagcccctagtatggtgagtgaccctagagtggtttttaatgaggagatactcacgggagccagcatctcgggggtccccggggggttcatggccaggagcgttgcaagctggtttgtttgtttgtttgttttgagacagggtcttactctgttgctcaggctggagtgcagtggcataatctcggctcactgcaaccttgcttgctctccctggctcaagcaattctcccacattagcctcccaagtagctgggattacaggtgtatgccaccacagcctgctaatttttaagttttttgtagagatgaggtttcactgcattgcctaggctgatcttgaactcctgggctcaaacaatcttccctccttgtcctcttaaagtgctgggattacaggtgtgagccacagcgcgaggccttgtttggtgtttttgtttgtttgtttgtttgttttatggatcattacctataaagtaatttagaatacccactcatttatgatccagccttccctgcattttctagcgttgaggtcctttggggccatagaagtatgtttttccaagactgattgcttcgtgtatttaaccaggttttttgtgaagggtttgatataaactgagtgactgaagagaggaacatggtgtgatttggtagaaagatctgtaattttggagtcaagactggcctagatggacagcttggccacttttaaaattttgtgtccttagccccataaacattttgagattcagttttctctcctgtgaattggggacgatattgcctaacttgtaaggttcttgcaaagatcaaatgaaaaaatacacatagatctcctggctattattggagtgcccagtaaatgctagttgccttatcctccattttctttttgagagctgaagacctgattttatttccttgcatttttcatgtcattgcctatagggagatacattcatatatttgttgctcatttttgtatgtgttacagtggtgataaagaaactgatggtatcccagatggggaggggcaggtaaggttttatcagtggcttttaatttctttatgaaattggatgtggctctagggaatagatgtctctgggatggtcatgttttcccttgccttttggctcctgcaatgaggacctctttctgttggtgtgggtcttgtctgagcatgccagggatggcagtgaacacatcgatggtggttgggacgtcctcattcccagacctctgggacatactaattcccagacctctgaaacatgggtctcagctgctttgccctgcagacttgttctcagtagctatttacctttaggagaaaaaaaaaatccttaaccaaatgctttaggaaggctttcttatcgtggctgtaaggtgctggtgggttgttggcagccaagtttgggtttaaatctcactgggggttgaggctgctgaactgctattcctaacatgctcttgtgtttttatgcatagaccgtcttctggatccttggtgagttttttttactctggggttttcaggagaaaggtttgtcattcatcatcactcttctccttcatcacagcagtggtaacagtggttagagggaggaggtagaatcagttgttcaagttcttttttcttccaggtaagtcccccccaccccccggctgcccctgcccttccgcattttctgggaagtgaatctattgggaaatgcatgggcctgtgtttctgggatgattttagcatatgtagtaagaggggtgctttttgctgatagcccaggcgttggtcctgtaatcctgaggtgtggtttaataagagctgaacagtcatttaattatttattgggtgcctggagaattttataggcaggagagcctagagctattccagaaaaaaggccaatcctagagctttttgtgtggctttcttcttgggcttgaagtttttgatgctcgccaacattcatagtagcccccaatgccacccacacattgggaagggacaatagagccagctaaagctctttctttgtgtgtgcccatattaacccatctagtcaaatgtgggtacccttccaaaccattatgtcttgttcctctcggctgctgggaacattaaaagaaccttatttgaaggcaaacattactgtatcagtgatgctgaaactggaggtctgtcaatggcacttcattgcattgataattgtttctgctttgaaccacaacactgtgattattgaggttcgactgtaagggctgagggagccttgaggccattgaaagcattctcctgcctttaggccaggcctatgttataagtgagagacaggtgtggagtgtgcagggagggaattaagatagatggtgacctggaattcagaaggtggacccccaccaccccccagcctgagaccaaagcacagtttaactctgtcatgggtcatgtgcagagggaagggactgccccagaattagcagttggttgaacaccctgcttaaaaactttttcttttcctttttttgtgagtaccggtccgcttggactaaagaagttttggtcgttgttttcttaattttgggctacagagtctctacctacatttgtgttttgtgttttggtaaccacatgtaacagccggtggaatcttttttctctttgctttctctgaactttccaaagagtaggcccctatctctcgggggattaactcctcgtggcccctgggtcgttggtgctcccccaccctgtgtcagcatctaaacctctgcacacaggatgttttctctagcgcttatcagatgctttagaagatgcggggtggagatagaggtaacgtttaacccatcctggattcctttcatgaactcagccacagagcagagggaggcttggctggagcaaacaatgttgggccttctatttcaaacagaggtgtgggggcttgtggtggcatcagtggtgcactgaacaaccctccctgaccctagcgtgtgggtttggagcctggggaatcaaagagaaatctaacaaactattctttttcacgtgtgggctgaatgaatgtgtgggttatccacatcagtttcttctctcttctcatcctccctccttcctcgcagaccagcattttggccagggtgcccagtttgagctcatttaccaaaggtgaatagggaagggagtagaaaccaaattaggcacctgtctgacaacacaaggatcttttctacaatggtgcatttggattatgcagagttttagattttctgttttatcccagggtgaacgtgtgtagaaaactgggacctaaccatgttcttctcttcagtcttatggtcattgctactttgaaggcagaaaggataaaagtagcatagggagtggtttaccataactgcaagtaaataccaagcatgtgcgagcctgtagacattgcctgctattggggaaagacggagttagctggggaaatacatcagtcttcactcccagcacccaagatgtaaacatttcttactcttcctggatcaggctatctctgctttgccttttctttcacctacctccttctttcatggcaggaagggaaaggaaagtacccccaagcagccagcagtcagcactggggcctctagggaagagtggattggtgttgttttgctgtggtttgctgtgcgttttccagaatctctcttggatgactatcagattcagtgaagggatggaccttcaggaagctgagagataggagatcctgtggcctgggaacccagaggcctgggccctgggaacaactcaccacaggactcagcctgcgaaataggaaacgtcattgtagcttctgcatcatgttttccatgttccactggaaaaccatctgttaaatggacatagaccaattcttgcttttcttctttctggtaccaaagagaacggtggtgtctcttgtcatctagatgttcttgtaggggcaccagagtcattgcaaccattttgagtaaagattgagtccactggggcatcagaaggggagtgtgtcattgctgttgttaccacacaggccgtggtacttgccttttcctgacccattttgcagagcaggccagctacttaacccctcgccacccactcacctgtggaaggcacatttgcaaaacaatagaccagttggtaatttggcacttgttaggtagacatagtggtacattgaggaagttcctcctgttaactaacctagtttttcttgctgtaatccgaatatacttctctgattttttgaaaaagcctgtgagtggagcctggctcgacagcccaaaacgctgaattaattctgtctctctctctctctcttttttttttttgagacgtggagtctcgctctgtcacccaggctggaatgcgctggcacgatctcggctcactgcaacttccacctcctgggtccaagcaattctcctgcctcagcctcccaagtagctgggactacaggcattgccactacgcccagctaatttttgtatttttaatagagacggggtttcgccgtgttggccaggctggtctcaaactcctgatctcaggtgatccaccagccttggcatcccaaaatgctgggactgcaggaatgagccaccgcgcccgacccaattctcttgagtgacatgctgagtggggctgctttttggtggaggtaacaaaaaaagagttgaggtattgattttagtttcatttgagacagcgatctgtcccctccctgagttccctcgtttgtttgtaaactgcttaaatgaactttttcccctgttcctccatcactctgctgttctcttctcctcctcttatcctaacagtctcataggtaaacttagaaggaagacaaatacttacaaattgtcaccgagggtaccataaaagagacatttggacagtagttctggggagatccttgtctttgcttcatgttaatacagagggattggggtagcccagatcaccaggggaaagtggtttttcttcatttagcttttaattgctttctttcacttttatgtataaaagattgtccatttaattaactcaagaatgcaatttcaaaaacactaatgctttacacatgacggcttttaaaataaaagtagcattctaatattgcataatgcttttctatccccttcctctccccgcgttcacccccacccctccagactgtattaacctttcatagcggagggttgttaggaggaaaacgctgttctggatggtgcctctctgcctctccttcccaccaaccaagtacagcagcacgacagccgcaggcctttctgaagtgttccgtagcttctgtaagaaagagactactcatcccttcccccttggccggtttcatgcctatatttaccctcttttgggggtcactgtggctcctactcccattgctgccttttaagaagcatcattatgatggattacatgggaaaattaaaaagaaaataaaaccccaacatttagctctggtttcttttgaataatttcattagaagaaacttgtatacattggtctatgatttcacgatcttcttttttttttttttttgagacagagtcttgctctggcacccaggcttgaatgcagtggcacgatctcagctcactgcagtctccacctcctgggttcaagcgattctcctgcctcagcctcccaagtagctgggactataggcctgcaccaccatgcctggctaatttttaaaatttttttagtagagttggggattcaccatgttggccaggctgatcttaaactcctgacctcaagtgatcctcccacctcagccgcccaaagtgccggggttacaggcatgagccactgtgcctgtcccatcttctcttttctgatggaaaagaaatctggctctttttcattcctttttatcctgcttccaaaatgttgtgacttccctatggcattggtctttcttattttgtaatggaagttcccctgattccagaattttccctttataccagctctcatagcccagtccctgctagatgggctttttatttttgaaagcacagtagtttcgacgagttttattttcaacagttagacttgggaaggggcaggatgcagatggagataaatgcacatacatatagatgcccctgagaaagacagctctggaacctgctagagtgatcccagccacgaggcgccagggccctggtgatcgctctgattttctaggtgagataagggaatggaatcacagagggatcagtgacttgcgcaaggtcacgctgtcaacaagggtcatagccagaatgagatccacttcctaggtgcatgggaggtataagcctcacctgccttgaagcctgcttgtgttttgtttctgatgatatccagaaaagaactttttagaccttgtaatgtgcattataaaacacttcgcatttagatctaacttcactccctcaagtctcagattaagactgtgttcttgtgttccgtcctccccagtgatgaaatgcttggttgtctagagtgaacaaatccaacaactctgccaaggggttctctgtgcaggtcacttttcaaagggatcttttctcccttggtgtctctcctccaaagagcatgatttctgagcctaccaaagtgattactgtgctaaaatttccaccctagaagaactattgtgtagctgtgagaagcgactaaaagattattttcttttcccagggtgggtgcgcaacattgactttttctcaatgtgtgatgtggagatatatgcatcttgggaggagatgcataatatgtgtctgattctataatatgttggtaaaaatgaccttggtgatgaataattttcaaagagaaacaaagctgggctgagaagagtggagcttggattggagatgatgtgcagtctacattttttgttttctgttttatttgaggagagagattttcaaattaatttggagtgaacagaaaatacagtggaaatttgggacttttttttttttaaagcctgtgttccttatagtgggatcccattttcacctcctctcctcccacctttattatgatgattattatcattattattattagtttgtactcaggaagcattgtaaaagatgctgggagggtttgaatgctgcttgtgagaggaaaggatgaggagaccatacggctttatcattcattaattcctgggttcattcattgagctatttaaacttctgtgtgtaagacggcagccccagatggtcttttggtgcctgcattagctctgagaccccaggcccggacaaaagagggtgcacagagcagctgagtgtgcagaatgtttccagccgttagaaagctgctcccgagtctttcagctcaggagctagaacacctatcatctccagcatctagagaatcccttttcaggtctttttcctttctaaaaggctcagtgcgaatctgtgagccagcttctattactgcagcagtagtcacagtatctaatttttagagtgaaattgatggccacgggcttatttgcaggtcttcttagtaattgctctctgtcttcttgttctggaaggagttctgttaacactggtgaaaactttgagctcatctcccttcttccccctccacattccccttccctgctcaactctctaaaagacctgcagctattaagaaatttccagtctgggctgatgaggctagatgggggtggctgcctgggttgaacacctaccgtctgcccgcctctgaatgcagcgatggtacacacagccccattcagtccctgcaacaggcctctggcatcctggcattaccgatgagaaacttcagctttacagagaagttcaaagaggttagatgttcagctcatgcttttaaggtcggtagctggaaatcaaatgcaggttttcccgattgcttggcctgagctcttaatgccttcttggatttctttgtggctattgggacaggctggcctcagtgttgatgggcaggtaagggtacccagccagtcctagcttcactaagttgccgctctgcctacctcctgcgtgtgcttccctagtggggctgtcccacttttggagtggggacggggctgatctgtgtcctaatccataacaggcctaatggagctgagacctggcactgcaggagcggaggctttggggtcagtcaggtggaagaaggagaggagcatggggcatgccccatcctccagatgtctgttcttctagtggacttcactttggcctttcagtagctctccatctgaatgtggcagttgtctcaggaattttgtcctagcattatctgactttattgctcttatagaaaatgctggttccccagaaataatagctggtctgtggtgagtgaggttgggtcattgtgccttgaggtgtgacatcttctttggcttagtcaggtctttggcttgactacaaatgtctgcgccttttcctcacatctcagattcttgcagccaggctctgtccgccatgccctgttgctccttactgttggagagacctggaggttggtggagttctccaaggctggagttggggtacacaatgaggccgagatgttttgcatagttccttccattgccccgatcaggaatgtgttcccgcaggatgggttatggcctggaagtgagcctaatgtaaacatccttgcagaggccatcctcttaatcaaatagaaatggtttgagggatgagcaacttgggggtgggggagataggaaaggaagagttgggggaggggagagatttagggattgaactcagagagagctgtctgggggccatccttccagcagtcctgacagaaaactggcttcatggagttggtgcagtgcaaactggaatgattctcttagggaacttggttctctcagacagtgtggtatgttgagggaaaggaaggaaatcatggtttggctgaacagctgggcagagcagcaagggaaactgaagtatgttagaagagcaggaccggaggatagagcagacgggggccacaggaggacttctggaaggagcccacaattcaactcctttgagggccttcaacatctatttaacgttgtaacattttgaaattctattttgaggggactagactctcagagaaggggcgtgaagaatgtgggggacttaggtgcaaatgtgtgtgctggggggcggtatttagggctcttggtggagcccctcatgtcatggagaagcgaaccctttccactgtgcccccacccccttttcctagccctatgaagggctcagactttcttggagatgtggagcatttcagccagaccctacggtcaaagatcagtcacagagcagtcttctgtggcaacctgtgcacagtcccccaaggcagcaatctggggtcaccagggaagttactgttactaatctgacctgggaagttttctttttcgtaggggaatctagaaatactccagggaaagccacggccaagcctttgcccagccagtaaacttttagggcttttgcgtgaggttggtttagaagaatttgccgatgccaaggctgctatgttggtttcactgatgcagatttaaagaaggagggccagtgagacctcgggaataggaaggcagaggaaacctttctattctgatgtcttcaagtcttggtgcttgaatgtgccaaggagagtgaggatgtaaataatttagtttgccttcaggatgcaggatctaatctaaacatgattaagctgatttgattttatagattggaatttataagtgatagaaactgatgaggttaatgtgaaatatttacgtaataaaaagcttcattacctgatgctgaagggtagagggagaaaatattcttggcaacatgtttaatcttttggaaatgaagttgggttaaagttttctttgtaaaaactgaattctgtgatcttgtttttacacatgctgtgcttaaatattaacaccaattgagcaaattgccttttaactgcctttatttgctttcattaacagtataatttaaaagctcaagaatttgcatggaacctgttgtgcatgttggggggaaaactattcataaattaattaatcgtgagaacattatctttaaggaaggtcacaaaacatgagcatgatttccaaaaagcagtgacatgtttttgccgtttcttggggacgtgatgtacttttggcttagagatctgtgctgcgtgtgtgtgtgtgtgtgtgtgtgtgtgtgtgtgtgcacgcgcgagataacttggctggatcaagaaaaattttaatgactgggcatgttttaagttaagttgagtgaacctaattacactgtagtttccagagagctaaaggcaataataccattggtatttaagcactagtttgaaaattaaagccaacctatataattggctgtgctccttagatggtttatttctttcttccctccatttctgaaatcccccttttctttctctttcacatttaaaccaatagagagaaagagagaaactgcctagcgctgcgaaccacaagacggtccttccagtggggaacattaactgcattgtcctctcatgaaatgacgctaaataatgttaaaggtttccagtatgatttcactgaaattggttgcttccttctgtacagatgtttttgtggtttagaacctcagccaaggcaaacattatgaatgagatgcagagaccaccatgtcctatgaagggctgagagttcctttgggagttattttacttgtgattctgacacctctgttttgacaaagcttcattctttcagtctcttctttccgtctccctctcctggtgctattggtttgttgtgggtggttttcctaattaagttaatctgcaacctagtttttctgggtccacagatgccagaatgctgaatttatttatcttgaatgtttttgttggctactgttgagacacattcttcctcttccccttttaccccaagtctgttttaaacattttttttttgaggcttccagacgcacttcaataaagaaagaatttctctctggtgtccatttgtcaatttttttgtgggggatgtatattgtaaataatataatagatatgtaaaaggttgtaaataaaacccaaaggttatagaggaaaagatgtgtaaatttgactacatcaaaaatttaaaactttttgcatgattttctttcggatttttgccttttccttgcacatttgttggttctctttcgatataaatcagaaaaatgaatcttttatctgtcaaatgcatggcaaagattcttcccagtctatcatttgtcctacagttttgattatggttcctttcatcacagaacatttctattatttatttaactaaaaaatgtcacaatgatgtctgtagcgtagattttataaagcatctgatggtcatattttataatctaaattttggaaaagtatttggataatgagagatggagaaggtagagggagagcaagggagggatagagagggcacgaagatgaggaagggagggatgaggaagaggagaaagactggtgagaatgaatgatgttaaaagattgatttttcttcctgtaaaaaagttggctgtcgtcaaaacaccccttctgtctaagggaaatattgtccttttggcatgtacttgaaccataaagatttctctacttgaggagacctttcctaagagttacctgtccagaaggcagtcctactgttctctctcatagctctacccagtctttaagacctagttgaaatgtaggctccataaagccatttctattttcacacagttcattttctttttttttttttttttaagacagggtctcgcactatcacccaggctggagtgcagtggcctgattatatagctcactgtagcctcgaccttccaggcacaagtgatcctccctcctcagtttcccaagtagctgtgactacagggaatgcactaccatacctaggtttttaaattttttaaaattttttcttagagatgggatctcactgcattgcccaggctgatcatgaccacctgggcgctcaagccattctcccgcttaggccttctaaaatgccgggattacatgcatgagccgctgcacccagcccacacacttcatttttattctcaaggtacctgctgctttctggcttatggaagatacatctctgcatgtctaatctttcttagagtgtcatgtgatagcagagatgctgtcttctgtctcactcgtctttgaattctatactgtctttagcggtgtataacaaccatttataagtacataagtgatttaccagacaggtcaattcttatccattctttcctcctatacgttcttctgggacattcttcaaaagagatatttggggtcttgaagtccaacacttcgggtatttggcataaattaggttgaggaaactggttggaattttgggaagaatgaaggggagagaaccaaggaagaaggaattccagagctggtagcgttgatttcagagtattctcaatctaaaaaccctgtaatcatgacctattcccaaaggtgagttcatggcagcttattcaacagatatttattgagtacctgacaagtgttttgctttgagtgaggcactgtagggcaagtaggagtaagtaaagatctttgcccttctgaagctgttctccagtttgggatttagaaaatttgttcaggaagagggcttaaaaaatagagacattctgtaaatgacctttctttgaaatcccttattctactttgactactgctgtctattcctcttcctaaatgaagctggtggaggctttttcaaaatcaattctatggaggttattggggcagatataagttagtcatctaatcatccagttagtcctgaactgaaacctggaattcattcttttacttttatattcatttattcaattagtcaacacaaagttgcacaatcaatattagctaaattagccaagtttaaatccatggtaaggcgaaactcccacttcttttctattagaaagctgatttcttagtggcagtaatgggtggtagggataaaaactcatcccatggctgtcttagaaccttcaggtgattcagtagaaatagtgctgtttctatctccatgatttattttcgggaaataagtagagatactggggtccagaataacttgatattctagttgacaatgatttctggagaacatgtccctgagacttcgtccatgtcggccacaatgttggggagcagtgaatgtctgttgaaagacagaataatggatgaagtccaaaggtaggaaatttacaagcgatgttactttgggatgacggggatgggagggaaacctgactggggagggaccaccgggcttcagtgtatatgagcagtttgctatcatttgttagaccttttgagcatctgaagtatttaaacagtttcttgttattctcctacttggttgatctttatctttgctgctgagttccaggcttagctcaatagagggaacagggagatgactgaaggcatagtgtttgtaaaaagagtttgtttcagttcttatcaaaaagctctttccaggaacagaacatacttttcattatatgggatggaaatcaggatggaagtaaatatgttctctagaatgttctagctctgagttgatttgcatagaggtcctacagatcattctatgctatatgttttttctttttttttttttttgaggcagggtctcgctctgtcacccaggctagagtgcagtggtacaatcttggctcactgcaacctctgcctgccaggctcaagcgatcctcctatgtcagcctcccgagtagctgggactgcaaggtgtgcactaccatgcccagctaatttttgtatattttttgtagagacagggtttcgccatgttgcccaggctggtctcgaactcctgagttcaagtgatcctcccgcctcggcctcccaaagtgctgggattacaggtgtgagccactgtgcctggcccaggtcgttccatgctgatgggctacaggggcacagaaataaagatctcagggcactcattattttctttcttcctttcttcttttgttaagagggaggtaggagagggttgtgtaaggatggaatattgctgcaaacctgtatacttctttaatttctctaccctcgcctgagacactggagccttttactaccatctttgggaaagaccttctagagaaaagaacctttgcttttataggtgagcagggacggtgtatgtcctccagcatagtttaaagtgtttggtctgttgcctctccagaggtcaaaggtgagacagactttttgttggtgttgttttcctccctccttcctcctttttttttttttttttttaaactccctttccttgttatctgaacttccaaacatcagctttgatgtctattgttgggacttcaagaggactcttaacacatcggcaggtgttggttttagtgagcaggcgagagtcccacattcttccaaggagagagatgggtcccaccacattcctacccctagagcagaagttcccgcgctgtgcctcttctctggctgcttgctgaggacgtctcccagtggggtactgggtgtacaccagctttccttcccgtctttctgaagcctgtctgaagggatctgtcttctttcagagcagctgaagagaggttgtctaacagccacgtattaaggtttcattaatcaaagacacttccactgcccctttacagaaacacaactgctgtggctgtcctccgctgacggcccgctaatttgtctttcccagaggaggggaggggagaaggacagagaggcaggcgctgcccctaccctgcagtagggatctccatactggctcccagcgagcatgcgttcatgtgctaactttaggggactgtgcccggggcttcacattttcgtgcagagccatgggcagctggctataccccctccccaccctgtccatgaagcagggaatcaaaaccactggaagcaattactgcagatagataggtttaggttgtcttttatttgcaagaaaattttcatttcaagcttcaaggttttcactcccagcttcaaggtttgctgaaattgggggcagaaagctctagaagaaataagaatatgggtacatgtgtttaagtgtgcttaatggacagcctcggcgaagtgaggggtgatggggacattaatagctggggagccactgacctgaaatggtacagtcttcctgtagttactgacggatgaaatcatgactttatgaaattttaatccttgggtatagaggcacaactgactttattactggaccccaggtgtgtgtgtctgaaatgagtgttttgaatctaactgcatatttgattactttctaaaatttaggcgttgctgaacttctcctcatgcttaggttggaatctgaccttctgtaaccctcagctcagaagatggatatttgggcatttgaaaacctctcagggcctcctaagtaggtgattgagcattgcgtcattgcatcgttgtcttctttttttaaagctaggtcctgtccactggggagcagctttgaactcactttattcaactcatcaaatatttactgaatacctactagatgtgtttggctctgttggagaagtaatggtgaggcgtaatgcgttcctagctcttaatttggggttagaactagtacacacatggctgtaatgaaagatagaataaaacatgttccctaagacaattggtaaatgcagtgaaagctccaagcggggaatgatcacatctgacttatttattcaatgagtgtttattgagtcctactgtataccagacaatggagatacagaagtccagaaacttgaccctcgtccccaagaatctaataagctggtaggggaggcagacactgagacatagcagcactttatagtagaatacaagtggtaataaaatgtagaacaaagtgtagaggaaatggaggtgaagcagcaattgactaggttttgggaggggctatagataaggctttgctgagaaggtgacttgtaagcaagatcttaaaagatgagaggaagatcactggttagaccagagggaaaggcattccaggtagaggtaacagcacacgcaaaggccgggggaaggagggagagagagctgcaggccatttggtttcaccagagcttgagatgtataaagaggttggtagagatagtagctggaggtatggttgtgagcctatcatgaagtcttgcttgtgcagcagagagagaagccgaccttttattctgtaatttgggagaaggtgttgaaaggttttaatcccgggagtgaaataataggaattatgacttggagcaccccgagcacagcattggggatggatatgtgggagtcagaggaaccacctaggagcccgtcaagtggtctaggtgagagagaacaagcagaggtagggaagtagcaaaggaggtggagagggaagggcacattgtagggggaaatgaacaggtcatgttgattgggggtgaagtttgaggaaggagttggttaagactcctgaggttttggcttggataactggtggatggtgggaatagagaaggagttctgggtggaaaaccaaagtctctcttttggacatggagtttgaggaggtcttggaaaaactatatagaggtagtctgcaatatttgcagtgggtcttgaaggaaagatattttgataagcagaagttgtcagtatactaattcatttgcattcattgagttctgatgatattttagcatgaacaagaatgagaagtatcttaatttcctggcagaaaacagtatttttggagtcccttgaataatgtaaagtgttttcatcaaagaccttcattcatgtgtgtgctgacatctggagagcagagatagatattttccttaggtctgggttcgtgagctataaactcttcccttgctcctaattaatcctttgtagttactgactgacgaaatcatgactctgtgaaattttaatccttgggtgtagaggcacaactgacttaaacacaggaccccaggtgtgtgtgtctgaaatgagtgttttgaatctaactgcatatttgattactttctaaaatccacagggtctagagaaaacagattagaggtgtttttgatttttgttgctgttgttgagacagaggctcgctctgttgcccaggctggagtgcagtggtgcgatcctggctcaccgcaacctccacctcctgggttcaagttattctcctgcctcagcctcccaagtagctgggactataggcacctgacaccacacccagcaaatttttgtatttttagtagagacagggttttaccatgttggccagactggtctcaaactcctggcctcaagtgatctgcttgcctcacctcccaaagttctgggattacaggtgtgagccaccgtgcctggcccaggctagagttttgggaaggatttgtttatttatttatctgtttatctatttatttgttgggcagtcttggaaaggatttatttaatttatttacctatctatcagtcatcatgagtaattctcaaatatctattatggaatcttagcacttggggatcacacaatttgttatctttcctgaggacacttaggcctggggagatgaagtgactggaaccagggctttctgcttcatattgcatttctactctcacccctaggagaacaggtaaaagataatttgtgttgagtgaggggttatgaagagacaaatgtttttaataaaaggagggttgcgtctctgtgatgagacagagtgttctggctttcatggttttccctgtctgaaagtaacaagctctagattacaacagtgaggaatggaggatgcacagatggctcagacagtgacttggagttcaggttgacatttcaggttgacttttgttacaaagaatttagagggggccaggtgtggtggctcacacctgtaatcccagcactttgggaggctgaggcaggcggatcacctgaggtcaggagtttgagaccagcctggtcaacatggtgaaaccatgtctctactaaaaatacaaaaaattagctggatgtggtggtgggtgccttagtcccagatacctgagaggctgaggcaggagaatcgcttgaacctgagaggcagaggttgcagtgagccgaaaccacaccactccgctccagcccgggtgagagagtgaaactctgtctcaaaaaaaaaaaaaaaaaaaaaaaaaaaagaatttagggggcgttgttagggggtattgtatacgagtttgtgtgtgtgtgtgcgcgcgtgtgtgtgtgtgtttgtgtctgtgtgtgtgtgcacatgtgtgtacaggttcactctctaccactgctttcccctttgctgacctggactggcctgctggatttcccaccaggagctctctaatgcagtgtcgactgctattctcaatgaggcccagcactgtcctggtgaaactggaaagagaaagtacgacaggtgctgtgttttttgtatgggggttgtaggatcagagaagtttagagttggtgggacactcaaggatggatagaaaacttctgtttgggtctctgcagtgatggagcaatgtggattttaacaaccagagtagcagctctcatctcatgagcacctgtatcgtgtcagtctctgagttaggttctttaaaagacagagttttgttaatcctcacaattttgtggtattgttaaatcagagtacagatgataaatggaagctcagagtggttaagcgctttacctggtgtcacacagctagcaagcggtggagcgaggatcttgactaatactgcagcttttcccacttccatggcacgctgcctccttctagcattcagtgaggaaagctctcaccgctgggagttgttcactctagactgagcgcctttcttagagaagggatttcttggagaaagattgcagagtcttctctaatgattacaagaaggacagagtcctggtggacacagttggagggtcttgtctggaggcagtggaatgagccaggtggcctcttggagctttttcaggagggaaatctgtaagggagaggagatgggactctaccttcgatcacttggaaggcggttggctgaggccagagagtatctttccataccttcccaggagccaccccaaactcctcaggcctttgtttctgaggttctctcagaaccactccaggcagagcccacaacacatcctgatgttatgggatgaatggggacatggggcagggcagcagcctggaagcaagtgaggttaaagaccgccttagcgagttttcccttccaccagacttcccctggctccccctggctttgttcatcttgaactcccttcacctcttctactgtttcatccctttccttcagtccaccctggatctcatcctttaaagccgaatcctctttcctgaagaggaaagaaggaaatcctgactccttagatcactatcctgtgagatgaaagttgctcttctaatttgtcccattttcttcaactcttcttcccctctgtccctgctccacactcaccactggcaaccactgagtctgagaccctcccgcacactttctctgcgtgtcttcggatgctgtatttacttaagctgaatacagggtctaaagggtggcagtgtcacattagggcccatcgagggagcagagggcctttgtcagagtctgcaggttgtggggatggtgactggcctggagtcggggtgaagcaatgggaactgtagaagaaaggggaaggagagcagggcagcgtggatgctggacctgtctcctcttcagccttttggactctgtgttccctctcctgggaagccatacagccttggccgcttcaagatggtgcctccttgggcagcacctactctggagtcggtctgcatagttaaatggttggaaaaaagactggagagccaatcagggatgctcacttgcagttcgtgtgaatcctgcctgacccacgtttagagacaccatagaattgtacagaaccttaggtatcaaactgggtttttcagatcccactttcctggtgagaatattcttctgttgatgtgctaggaaatgtttaatccaggtgagaaacaccagactggtagtgtttgcgatttctgtggtgtagatactcccaccatggctaattccaagctgctggtgtggtcactgaaggcggagttgagaaaaggtgtacacagtggtgcaagccagctccagggcaccgtggcttctgaacgcaagtgtggaagcgctaggagtcctagttgctaggctctagagtggaagttgaatccttggtggggctgccagtaaggtggggaggtcattttctcaccaaatcaaaacacaaaaccctggctgtgtcgtctttcttattctcatgcctggttcttgattgtggctagcaccatggctatttcaggatcccactcatactgctgccattggttgaatgcttacatccattatctcatttagtcatgacagtaatcccatgacatagggactggtattatctccattttgcaggtgaggaaactgaggcacagagtgggtcagtaatttgcacagggttctacagcctttgagtggtagaactggaatttgaaatcatgactgtctgatcccagatcccaaatccttgcccagtatattatactcgcagttttgtagcttttcacagacatttccaaattctgagtctactctcaatgcagggtcttctagcataacctttgttcctgttggcaacacttcattttggactgtcaagatgcatttcctgagatgtgagatgtcatgaccctgtgtttggtaagtttggctgcaaggtactggctgtcctctaagacacttcctgagtcccaagtccacagattttactgaggactgaaatggctgcattcttcatagacactgagtttgcctgttccaaaaatggtgatttctatagcaaccatttattctagcagatgtgtgcctggtatggttggcagagagggtgggaccaaaaatggaaacggccttttattcttcacttcctgaatgcacgccctgtatgtgaggcatataggaggaaaaacatggcatccttagaatctgtaatagatctatggctcaggaaagaaatacgtgttgcttcagactgctttttatctggagcttgagttgggctgtgtttggtttgtggcgtgttctttggcagatgtacctgttggtttcaattcaatggatgtttgtcatttggtctctgcagaatatgcacatttactgtgggggtaggtggctaataaacagagagaagacactggcttggctcttaaagatcacgacgtctatgtaaatgtgtattacatagggctttttttggtggaaagtaaaataaccaatttatgccagcctaagttaaacaagaggatttaatatcataataaaggaaggttttatggagcccagggacaggagcatggccccatctttgaaaggcaagtgagcggaactaagaatgaactgttagaaacttaggtggaattctctctctctttctcatgcttgtttagtctttgcacgtatttccattttcacctctctgcagaccacagagtcgaaaaatgaccaccccaggactcccaggcttacatgtgaccaggcttgattcagctttccctgtgtgtatcccaaattctagaaagagacacagtctgtctgatgcagcttggatagttatccactcttggccaatcactcaccgaaggctttgtggtgagtgttatttatctaagtctgctcaggctatcataacaagatactacagactgggtggctcaaacaacagaaatttatttctcacagttctggaggctggaaaatccaagattaaagtggtagcagatttggtgtctggggagggctctttttctagcttgttgatggcctccttctcgccgagtcctcccagggtggagaaagagacagtgagctggtgtctcttcttacaaggacactattctgtcagatcagagacccacccttaggaccgcatttaaccttaattacttccttacgggttctgtctccaaataacagtcacattcgagatcagcgcttcaacatattaattgtagaggggcacaattcagtccatagtagtcatgtaggataacatggctgctgggatccactcttgggccttgggaatagaatggatctcattggctccccgagaaggagaccagtgcagatgaaaaggctgaataccctgccaagacaatgtcctgtgccagattagaatctaaacctcattgtcgaactcaaacacattgcacttggggtgaatagtcctgctgtgcgtgtgtgtatccatatacgagatgtgtgcatatatacacatatgtacaggcatatatatacatatatgtatgtatgcacatgtctgtctgtgtgtatgtaattagagaggactttctggaaaaggaatgtttgagggtggccttgggttcctgttggctgtgaacacactcctaatgagctgccctgtgtctcagtttacacatggtatttgaaattgagtctaaattcccatttcttgtactttctgaggagcagtcaagaaagagccagatttacagtttgccagtctcttagctctatgttccaaaggaattaagtcactcttcttgacaatggccttaaaatagggttttaataaaatgaaaagaggagcagtggagccacccacccctgtcacctgtggctaaatggatatacgggcgccaggctgctacgggagccttttgtggtgtcacctccagtgccagtgggatacgtgccgcaacagagaccagatgatgaatatatttttaaacttggaacccatgaaccacttattatttctgaattaggaatcaaaacatatgaataatttcaacagggtttcagcagatgtattctgcttttaaggtcactctgctttgcggagatggtcgggggtaatggggagtgaagtccagcctgattctctttgtgactcttaggacatctgtgtcatgtttgctcaatttagcagtcaccgtaagtgtgatgcgaggccctcattgcggggtcagggtaacttatggaagcaaacagccttctttattttttaatacatcactgtcacctgcgcttatgccaggggttattagaagaagaggggctctgggtggccatgtgttcatggctatgatgactgaaaaggccacagcatgcaacagagtcctcagatttacccccaaatgcttctcccaccctgtattctctcttagcatctctccctgaacctctttcgccaaccccctaccaaacaaggtccagaattgaggtgttctggaattccagccttgctaagctctgggattaaggccagtcatttggaaaggggatgggggaagaggcaaaaacaaaacaaaaaaaaaaacaaaaaaaaaacaacaaaaacaaaacaaaaaaaaccaactgaacattaaccctttgggtccatagcactgagaagacctcaccatttcggccactggcaaatcagcatctcttggccatatccccgaaacctgagcttcatgtaccagaaggagacagttaagccaagtcaggctgatgaaaatctctccgttctaatgactgtgcagggtacacctgttccagcctctcacttgctctcattgtcagttggacgcaggtattgaatgaccactgagtgtggagtgcagcacgggggtgctgtggaggaggagagttcatgagcaagaagagaagcagtctcttgacctcaggaagcttgcactgtgtttggggaggcatggtcatgctcactctcttgctctcccagcacaaagggagtgggctaaagggtgggagggaggcagatagttactgggcctgaccctcttctcggggtcagccacagatcccagatcctttaccttcctcatctgcctgttttcctttatagttctattggagttaaaaaaaaaatgacagcagtgtcagtaacacacactcattttaacaagagaggcagtacaaagatatctataaagaattaacagtattccttatttgctctccatttcagctctcctctagggaaatgaatgtgctttatttttatgaaataatttcaagcttacagaaaagtttcaagaataatacagagagcacccatatcaccttacccatttggagtttactgatttttaatagtttgccccactggtttccttcctgatctatgtaaccgtagagcagccttttgaggtaggagacaggtggtattatctttttgtgtgttagaggtgagaaagctgtggcccatggagttgaggagtgtgcccaaggttatctaactatccgacaacaggtttcccacacaaattccacatgatgtcattcttgttttcatttttgtctttccttgtaggacttttttttttttcatcgagcctgcagaaggggcctgtcttgccttcacaaggaggagatggttgcaggaaagtaggaggtgaaaggtgtcctccaagtctcctcccccagatcagtcggacctcctggcctcctttggttttccctctagggcagaagcggtgctggctggagggggtccaggtgctgtttgttgcaggagcgccatcttgctttagacctttttcgtttcagacagctagaggaggtcttttacggtcctacttgacccccataaaggaagttcactccacaatacgcatctcttttcacatgaagaggcaacagagggaacaaaaggagcaaagcagccttctcctgaagaggtgaaaatatcactgccttttggagccagatctgggtttgcacactccaactcttggagtgatgtgtccttatttgtaaaaggagagttctggagtacattgggaagcaagtcatcagtcatatccacagcctcctgctcctgttaaatgtgtcctcctagatggaaaggttggaacaagctgtgccccataggttctgccatttttaggatctttctggcactgagacttttgcttctgtgatctctcattggaatccatttcttttgcccaggcgtggataatgcttttgtctaatgccagctctgccccatctggtcttaaaacgaggtgaatctgctgctctgtattgaaatatgtgatctagaaggagccataaaataggaaccttaataactctttctctctgtttcattatccatgcagttttcctggcagttgtccattccggcctcattcccacctctgggacatgtcaagttattgaggtggtactggctgtgggtgactatagatctgggccagcctgttcaactgggtcttctggggttggtcctgggtagagctgggtggatgtagtctaaaacagagaaggtagtgaggcccttcacatccattttaaggaagctgagtattgttgttgagagtggccctggcattgtcttcatcaagaatggggttagggatctggctgcagtgacactggtgaggtgagaggttgaagggatggtcagacattactgtctcttgagcgaggttctgaaagtctattccttggagactttcacaaactggagggagaccctgtgtgtccttggctgaaactagaggcccaggtcacatgaccttgggagagaagccactcatggcctgaggacccagtgagctccttgacctacgaggggccatcctgatttctccacttcccagtcaactctagaatggagtctctgcctgacgaaattgtggttattttgaaatcagcttgtcatgttccttgattgttttgggtgtaatagtctcttctctgcagcaggttgtaagcatcttgaaggccaggaccttgtcctttcttctttcattggagcagaggttagggaatgctggcttctggacccagccttggaccccagggttagcactccctggctcttgcagttcccccttgccccccaactccactattcccctggatcacagagcttggtgacagcagtgtagccccttcatctcagcgtgatggtgggagggggtcgtatgcattttcaaagcctttcctgtgtgatgtgccctcctggtgcagcttctctcatgagaatccccagcctagacgtctcttctcttccactgcagatcaagggttctcatagtgacctgctgagccacgtgcattggactcccatggtgtgcgtgtgaaaattcctcagcccacacggatgggccagaatcagaattcctggagtgggagcagaactctgtattaaataagccccctcagataattccaatgtacactaaagttagagaaccactgtaatggtctgatgtccctcacactccccaccccagtacacacacacacatgcatgcatacacacatacacactctgttaaatggctgcttctgctgttgctaagaatactttgcttttcaggtgcttgtggatgggtaggaggcagtgcctgattttgagctcttgactaggaattgcgtcaatagttagaggagggaaggatcagaaaggggacctcagaatggggttatttaggggctggggagtcagaagaactcagaaaggggcctactgcattgctggtgaagcctgaatcttccatccactgttagcacatggctatgcagactctgattcccatctgatgccatatgtgcttcctccacagtccgggagaggagctttgggtcatgtgattagccttttgccctggacagcgcagctaagctcagcacatgtcttgggatggagctgcagaatcttggtgccgtctcccccttggaaggctagagtcttggcactgagaggaagtccttcctccatccccagcctcctgactccattgctagcgactcccagcaagttaagaaagattcagtgggaagggtatagggctgggagttgtctggatctaagcctttcttgctcagtttgatagactttggaaaatctctgtctctctgggaactcagtctcgtctggtccctggctttagcacagtgtgtccaccattgcagccatgggcgagaagccactagagctatgtctcttccttaggagagcctgggggggatcccaaggtgttggtggtttggaagggcagtgaccctgcatgaccaggatccatttgcccaggcacctgctctctgccagcctgaacacccgggagcacctcccggatacgacagccacccactacttctgcatggccgtggccacatgggcacagtggggtgaagtgaagatctcagactctggagtcagacagtctggggtttgaatccgagctccaacacttctagctgtaggatcttaggcaaattgcttaaacatctgacctttagtttttttcacctgcgaaatggcgggtaaaaactgcgactagctcctagggtgtgttatgggatgcagtgaggtgaagccaataaaacccttattagcacctggcacacagtaagcacttcatgagggttagctgtgcttgttgttcctgggtgtgtttggaggagacttgtaatcttgtaaagtgaagttcaggtcctcagagacaagtggtgtctggctgtgggttctggccattgaaggcctgggtggtttagaagggttttaagttagtgccttccctagaggtgggcacacgtctgtcacctgcccctgatgtgctatttatcctgccaagccctggggcactgaagcagcccagaggcggctactgcaaacaccagggagagatagagtctccaagaccccaaatagagtttgcaggacctcttgagctctggagcaagaaggaaagggacagagacaggccccagtgtcagtggcgggttgggagggagcagagcacagctccccatgtgcgttcaggtgcccagaatctgtttggccactttcatctgggtctgcgtgggtgggggcgtgtggtagcccagaacccacttggcaccaggtacaattttgtcttcagctccagtggctacttttctctcctttgcttcactttgaaaatagtcagcaaaatccttatttccataagcatttttctggctgtaaaaagctgaatcccaaacctgttattatagctgttcatgctattttaatctgctctgtttagaggtgagagggtagcagtgactctgcaattactgagtacatttgatccgtggcgcagccaccggagccggcagagaacccttggagtaggatggtgtcgtgtgtggcaaatcactttcaaatttactaaaacgatgcccctttgcagccatgcagatatcataattttcctccccaaggcttgttgaaatgcccatttgcttcctgccttacgcaggctcccagcacgcgccccttggcccacctgcctattgcctttcattctttgtcttggccagattctgtctggtctctcttgccctccgcccctttttcttcttcctccctcttcatttcctgctcagaaatattttatattctactgactggcatgcttgtgaaaccattttccatttgccatggtcagaagaaaaatagttagcattttaaatctaccaactatttcacatttaaacaagctggcaagccgcaatgacgctgcgcctcctacatacagtaattgttgcatccctaggctcccttttctatctctgttcctatttcattcatttttctatttgcagccagcacagaatatgggcttctcccccctccttctctcctgcggcccgctttctatccagtgaccttggcttctctgagtgccgcaccgtaaatgaaatgtggcattgccacatgtatcttgataaaatatatcagtggatgaattgattttcatattgatttccttggatgagcaaggtgtgtgtggaaatcaagtgtctcttaatgatagtcctagagagagacaggatgcccagggaggagcaggctttgtttttctttcacttacgaaaagtttctgcttgttagcttgggagggaggcctgtttgctttgaaggcacactctctttctgggggtaaacagcaaatgtcccaagggtgtgtcctgatccctgagaagactgcatcatccaggtgaccgcctagagccttagggaatgtatccctctggactccgccagctgcattgtctttggagagagctgaaaaactctcaaggcatgttggaggcccttgtgcaccctgcagggtggagggtcttggctggagagtggccttctccctggccacttccactttcatatttcaggttagttgagacgtggcacttatgaatctaggactgatgctgtgccccaagggcatgactgtgtataattcataagtgtcagcatcgatggctggctgtgtatgggcatgtgtgcttgcgagcacacgcatctacaaatatgtatgagctttgtatatgggttggctatgaatgtgggtaggcagcagtccctaggcttgcagtggcttttattagcgagctctggacaaccaaaaagacagcatccagtgaggtgatcaaaacttcatttcatctcctctgcagttgctttcccaattcactctcccaactgctcctaaataaaatagatgctttcagctgagagttgaatttctttatgaggctaagtaagcgtggcttaaggtgatactgtgcatgtgtgtgtatgcgcatgtaaagaaaatgaaacagttaactggaatattcaggatagagcgatgataattcattacattttctggctaactgaggcttaactggaaaatccttttagttcaagcactgctgaaatgctttgcaaaacagactaggatattttcctgcttttgtaagtagaaggtagtgaggtaattgcatcctttgatgtttcatgatcttgcagcacacgagggccggtattttggttatcatttgtgattgcacagtggcatacaggagatggagaactagcttggattcatgtttaccctttgatggtggttctcaatgggggacaatttcgtcctccagggcacatttggcagtgcctgagacatgtttgcttgtcacaacctaagaggttgtttactgatgtgtagtgggtagaggctggggctgtttctgaatttcctatcgtgaacaggacagtctccttctcctgctcccccaccccactacaaagaattatttggtccaaaatgccaatagtgctgaggctgagaaaccctttcaaaatttttgtcccaaaatttttactaaattcttgcacataaaatcttttgttttctctgtttttttctttttaagggtcaggtgctggaaacgttctgaataattgaaacttcgaattcattgacgtttattgttccacagaacaaatagggaagcctgccagtttgcagataggcaggcctgtccccagatggccctccagtgaatgcccaaattcattcagttatttagggccattaaaaaccatgagggccacactagctttaagttgagctaggcagaataaacaatccgagaggggggacatagctccccccctttttttcattgcagttcaaactaaaatgctcagagacttccggtagcactttctaatgatgcagggtttattctgcttaccgcgggtcagagacaatctgacgatgacagacttagaactgctttcagaatgtgtaaacatgttcattggtttgaatggctctaagtgagtcttcggcagaatctgtctggttttggtatgatatatgtatcttggggaaaatggggagattttgcatgctctgtatctttgactttctttgagaaaatacttgggagtcaatgagttcacataccaaaaaagccttatgcagaatctaactgggtgtgtgtgaaagggggagcggcagaagttaggaagactgaaggacctcctttatgacagtaaaaaaaaaatcttttaaacttaatttcaaatgaaactttaatgtcaaatgttctggaactgtcacacatcattttgttaacctatacctattaggtataggtataggtctagaatgctgtacaagacgggttaaatgaagtctgtgtgtgtctggtgaatgcatatgagtagttagagatacaccattcaatacttgatttatttgtgcaggttacctatcatggtaacctctggcaggggctcattatttcatataaactaaaaaggaaaaaactatgcctgcaagactgattgattttctgaatcactcacaaagggcagccatgcagcccaaacacacttcatctctcaagttttattttagccttttgccttacaatgtctgtcagtagggacaatggtagcaccagaggcctgggggtagagtcggagggatgaagttccgctgccctctagctgtgtgaccttagacaagttgcttaccctccctgagcctccatcctgccccctcgcaagcttgttttcaggataaagggatgggaaagccctgtgtaaatttccaagagctgagtaaatataaagtgctctggatattgttccattgttaagcaacggcaataccatttataaatcaggttttgagtccatctcgagcattgttcatgagaggggccggagcctcccggcaggcactcctttaagagctgttatcacggattactccatctgctgcttgctagccgaaatgctaaatggagttgtgggtgtacctggggtctttcttgttacagtatagactctgagggggtctagatgtgtctcccctcctttctctgagatagaagtgtatttatagcctggtgtaagtacaatcagaaggttcctataaaactctgttattactgcagtacaaagttagaaatgcttgaggtttcggcttcttggctcttccatgcggcaatgaatattttatgggaaaggaaatacttagtgtctgactctttttatagtgcagctactcacagtgctggtaaccttccaaatctcgccaaaatcaaaattgctgcctgtccatctctctactcccttcttcacaaaattgactggtgtcctgcctcgctgaggtgtccagattctcttggtggacgggtccatttacaaaatgtggggggtgcagttttcaatcctagtgaatgccctaaaccagaggcgttggctcctccccagccctgccccacccctggcaccttgtggtgctggtcagccccagcagggcctgctggcagagtgcccactggatcttccattgaaggtctccatctgccttttctgccatgcccctttcctgcatgcccactagccgctgagtggaggtggcccaacctctccaaagttcactctgatcttggaattcaaaaagcaacaggtgagtttgaggtccaacaggcccctgaggggcttttaaattttaaggcttgagcttcggctgaagccctggcacagagcagtcatcgggctggtaagatttccctctcaggtcctcttcctgtggtccctttagtgaccccacgcataaggcaggaaaattgggcctcagtggtcttggccctggtttactagatcagggactttaagtagaggaaatgggtctcctggcaggtcagcatccatggaaattgctcccctggtggcccaagggcattgtggcacaggtgttccactgggttggccccatggtcctcagagacctattacgactatagcaggaccgcagactaggctgatggccagattacagtgtcaaagaacacctttctcaggcagctatccctcatggatctccttagaggcccccacaggctagtgaaatgttgacatctcccatggaggtgggctcagtggcctcgtctttttaccagtacccaaaaagcccagagtggagagcttggcaggtgtgaagtgtggctcctgagatgcacgggagcacagctggttgtgtctcaacactggatcgtgacagtttttcttagcatgggcagggctgtgaaaaatgcttaacataatctgaatgtgggctccacacttaatttagtaggactctgcgagctcaccagcatcattgcatttgccttctgctctgcccctggtgtttgtcttggcgccaaagtaggtaaagggaaaaaatgatttgcaaacctctggcagctttggtttgatctcccaactctggttgcattactgccaaacagagctgtattttcacatgacagcttcgtactgggccttttctttctttcttttttttttcttttctactttttggtatccaaacttggtggtagcagaaggcaaggtggggaatagagagcttttggtatcacaggcttagaagctcatttgtctcttaagatgtgagggtaaggaaagggttagttattatttttgataaatgggaatggggtcagccaatggcttactggagaaactagatatagccctttatacttaggactgaccacacagttgaaattaattagcacagttgaagtaattagcacagttaaaatttagggttcctatgaccatgaagttgatgggtgggagataggtaaggctcgaagaactgaaaaacctcaaatgtgctaaaagcttcattattggtccttattcatattttaactcaccctcctcatctgtgaagtcattttgtttaaacaatgaaaatggataaaagaaatggaaccagagagagaagcaagagagaaaaactttaattaagtgcctattgtatgatagacactgctgtgttcttttaaataaatacctttcagattaattccaaagctaagatttagcaattccctggttctgggattatttggccctaggatcagataagccaccagtattcactgagtcattcagactccagagttgcgccagatcccatggaagatgcaagaatgcatataggctgtagttccttctcttgggggttgagatcacacagctgtatacccatgtgtgcacacacagagacagatacagctagtggatcatgccggggggaactatacattccagtgctccagaaattcctggcatactgtgcctggggtattaggaaggtgacttgtgagtccctccgtgggacactccacctccttatggcagcttgtggctgccatgatgaaatgaaacacccactcctgaagatgtacaatttgtgagtgtggtagacaaaatagtgactccctaaagatgtcatcctagtctctgtaacccatgagtatgttagattacatggcaaaggaatgacttaaggctatttaccagctgagtttaagatagagaaattatgctgggttatccacctgggtccattgtaaccaacataacctcaacggtctttaaatgtggaagagggaggcagaagagtcagtgtcagtgtcagagtcagaggaggagtgagccatgggcccaggaatgagagcagcctctagacactgaacaaggtagggggacagtctctccttgaccctccagaagccacaaagccctgccagcaccttgattttagcctagcgagacccattttgaactccttccctacagaactataagatacatttgtgccattttaagccactcagtttatcgtaatttgttatggcaacaaaagggaactaatatagtgaggcagaagaaatctgagtggctcatccttgggcaaatgggagccagtgctgatccttttactgttctcgggtgctcttgcaacaggaagtgacttgcagaagtccttttttatctgaaatgccagggaggatggactcttattcagcctagcttctattcagctcaaaggaaagaacatctgcctttttcccacatcttctctgtacccctcacttccttcttgtgggggagattccttttcttcggtgagttccctttgcggtgtggaatctcgtggcaagggctctgagtaaaggaggagggttgcatggaatgccattgaattcattaggcttggactctagcaggaatgttgcctggggtgctgatgtccttctcaaccttcctttgctggagtccttcttgtaacttgtcttccttttgtgaacaacctgggtgtagtttttaaaataagcgaattctcctagaagtgttaaaaatgagccttcaagtactatctcggcattttgcaaaggttaaagcccccactgtttgggggctgagggtgctctatggggggccacccaaaagcaactgtggaaacagagtctggcttcagtctctccagatgttgtgcacataagggagggactcttgagctcatagatcacagatctgtccacaggctgtcagtaggaaagagcatcttattttacagatggggaaactgaggcctagagagcataagtggttcatgcaagatcttacagagagtttgtgagagtctgagagctgttccccctactattgcaacatttggaatgttctgaggttcttaccttctattatcagtttgagggctgtagatgagttgtggtagctacagagatgagctttccagtgtgcccccaccaagagatgaatgaaagtcatcatcgggcagatcactgcctactaaaaggggtgggtttttttggggggaggttttactcttcgtcacagaacttgagaatatttctactgaggatgactttgtctttggggcttccattttatttttaagattcaagtgtagttttaactgcagggcattagctcccttgtaggtcacctcgtgctgtctctggggtttatgactgagctctcattccttagtcacatgtcctatactcacacttcctatcccattttcctgcctcaccaagatcaccacaatgatcccaggttctatatagcatttcttttctggagttctttaaaaatattctgggagatctgtctggaatgcttgagtacattcatttattcctgtatgcatagagggcccagggacctcccaggctctctgagccctctgattcttagagggttaaactattatggaaacagacattgcatctgtgtcttctcttgtttcctgcatgcagcagtgacctttggagtacactgttcaggagaccgacccttttctaccatttgaagtctgctattctcatctctctaccaaaagagaaactaaacttcattgtcgtgattaaggtcacagccaacagcagttaaagaagccgttggtcttcccactcataccgcttccctctccctagctctcaggaggaagagctctccaaaatggaagtgtcttgggaaagaaatggaagtggaaagagaaagatgaaaaggccaccaatggcacttcccgtgtctcagcctcaccagagaaggaacttggccacacactggttgggtataccaaagtgacacaatgtggatgttccagtggcaattaagtatttatatgactagacttgaggagttccaggccatgacacttccaaatccttccagcccgcttgtggagagaggcccggaggcttccagcgagacaattagagtgtgaattagattgtgtcttctggaagggagatgaagttacctgcctactctattacagtttatttcattaaggttgaccatgcccttttttttgggcagagggaataggatggattctctggagaaaacagtgtagcaaggcaatggagaaatgtccacactggagtaaggggctttctgggacctggatggagtctccttcctcccctagggaataggacagaggtgggaaaggtgctgcctgactgctctgtgcacatctgcatgttggtgatgagtgtggccagccccatgctgtgcatcggtgagaggaccgctcaggcaggtgttgctgtgctggcagcttcttaggaaggcaaggagcaaggcgtgggctgtggggcccttggggcagagcctgtcatggagtgggatgaaagggtgcacgggacctgttggcagccccagcggccaggctctgttcccaagttggagagagaggcaagtggtgagggagggcaggaggaccagtcatgggtttaatgcaaaatgacagttacgggggttgccattttagagtaaaacaggccatgtgactgaagagcaggtagcattcatattattcatatttcgagcttggtagatgtagaattttgcagtggaggccaggagaggatgtgagagctgcaggacagaggcataggtttttggaggtggttgtggtgttccccgatggcaatcaacttcacggagagaagaggttattttctacttaggttgcctggagcctacattccaaacttttagtcctcttcatctagcactaagttttgcatctcccttattcctgtcatacattattagtgtgcactgttttaaagtcttttacatacatatgtcttgcattccctacttaattgtaagctccttgaaggcattgcctgtgtattatgtttctttgaatctctctgtggtggctaatgctctgccctgcatttagtaggcaataagtttgtgttgagttttgagtcaactaccactcttttctcccttcctcttttttaatttttttttaaattactttttattttttatttgacacagagtcttgctcggttgcccaggctggagtgcagtggtgcgatctcggatcactgcaacctctgtctcccgagttcaagagattttcctgcctcagcctcctgagtagctgggattacaggcatgcaccaccatgcccagctaatttttgtatttttagtagagatggggtttcaccatgttggccaggctggtctcgaactcctgacctcaagtgatccacccgcttctgcctcccaaagcgctgggattacaggcgtgagccactgtgcctggcctactcccttcctcttacaaggctccttactcatttcctgcgtctcacctgctctctcagcccagttttctaaaaaaagaggtaagagatggatgccagtctctttctcctccagagtgattttgtgaggatttgtacaatgcaagtcttgagatgcaaatggacatctaggaacagaggaattgctggagcatggagaccacacttctgaagatggaaggagacccttctccaggctgtcgcttttgatttgcggttttcccattgccaattgctcacactgatccccagtcctgaaggggatgggggctgccgctaattccctggcatctcatgacttcctgttttcctccagttattatttttattgtacttccttcctgcttcttcactctccggcttcgccagtttgttccgtgtgatcatttcagctttatttggaaactggaagcctcattttactataatagtttcttgacgattttctaaatgaaacttgcatacttcatctgctcccccactgctcagatattaaacaaatatctctaagaggtttccttctccccccccaaagaccagcagtttgctcaaacagatggcgagagatggcgtgtgtgggtatgtgcccgcggtccacgtgtgtgtgtgtgtgtgtgtgtgtgtgtgtgtgtgtgtgtgtgtagtagaggattcttatggaaggtgccagtttctgcagcatcttcttgcctttttggcatccaactacggagcaagacagagcctcctggcaagtgaccaaacagagtgagtgtccggaaggcccgtcaccctgatattcacgcaaagaatctgtttctctgtgaatgggcggctgtggaggaggccgggggagcaagtggctggccagcctccaaggccagatgttctgtagtaccatatgtcaggataggaaggacggcaccgagggctcctagagcgtgtcagacctcagctcttgaactctgtaatcctcatgcccccttccgtcctcggtcaagaacgaacaatgcttccctctttgtctgcttttcaaccccacctcttttctccattagctttctggtctaaactcattattgagacccctccacaacattcaccttgcctctcctttgcctggccccaggctggctgcccctttttctggaatgatgctgttttggtgcctgtttccctctcatctgaaacaaccacctcctcttctatgtctgctgcctccttggtatcttctaagcccaggcatgagcccccctccttggggaggcctgagcttttgattcccactcaggctgggtgttgagattgtcctcaggacctgacgtgcacatgtaagtactggtttctcttatagtgtgtattgtcttccctcttcaactaaagctttaggagggtaggttggtgtcttatgctttggttgtatccttcactatgccaaataaatacctatcaatcaatcagtcaatggattctcaacttgcctaggcccagaacagaggagacctgtctcctagccatgttgagttggtagccagtgcagggtgctgaaggaaagaagtgtagctcctcggctgcccattcttgctgccatctgcattctgatgagtagaggatggcatgtttagttggttggaggtaacgaacagaagcaacagctcttttgagttccctgctgtggtaactcttactccgtggagtcactcaggcacctgtgctcgggagtagatggagataggaggtttgttccagtctctcttttcttgtaccttcctagggaatagcaatgtcctgtagatgtgtgacagtgataccatgttggcattttgttctggaaggctgacctaactactgtctttggaaacattctccttctcaatttagaatttgggcccttttctctgtctgtctccttccatggtccctgcccacgctgagcctcccgcgcccagccagctccattgtttcaagaagggctttggggctgctcgatgactgcagcactgggaccaaagtcctcagcatcagtctcaggactccgcatcatcagcccactctaccgcctccgcaggctcctcgccgctgtcttcaccacctgcccactgtggataagccaggccagcctcctgaaggcttgcccggcggggtatgctcatttctaacaccaagtcttggctcatgtgatgcctccatcacacggtgctccccgtctcatccaaggcttttccattcttaacatttccaaacatgggtagctagaacccttcggagcttccagagcccccgaaaggaccaactgaatctcaccatatcctcagaccgtctgcagtgacagcagctactgttgatctgctcctcttctgcacacccatagtgatttgttgacatattggcacatcaccacatcctcctctgtctctttctccatctctgtcttgttgtccactaggttatggactggccagggacaggggcctttctcttctttagtcttacactagctacacacttatcataaagacattatgttctcagtgttgtgctaagttgttttacatgcacagtctcatttatgtaccttcgcaggtaacagtattgttagtctgcttgacagatgagaaaactgagacttggaggatcccaaagtcttagagcctagcaagttgtagatctggaattggcagacagggcttgtgtcagcctaagttcttaaacttcccgttctactaactagtggtatcaggctctgccacttacaagcttaacgaccctgggtgagttgtttatttccttgtgcctcagaaagaaatagaaataaaaatacccgcttcatagagttgtcctgaggatcgaatgagataaggcatgaaaatgcgcagaatagtgcctggcacatagtaagtgctcacatatgtcttgtacagatttgcttctaattcttcttcatcaccaatatcatctaaacgttgttggtattacagttatcacttttcgtgtctctgacatcattttagcacctgagatgatgttatgctcttggcttgtgctcaggaaatgcttaatgaatgactgaaaaggcacttgggcttctggaggtgacttggtgacaaatgctcagtgtgatgttgtctttgtggcagatgctcattatgaggttgtctttgcctatattcaggcttggcaggttcttgtggcagcggtggttaaggattaaggcattgtgtggagtatggtgggggctgcagccgacaaccttcctgttgcctaaaaactttttttccttcccacccccttccccagtagctctatgccctgccaagtctgtgcacaagccttgaaatgacaaagtaccctttagttaattgcacaacggattgcctagagttaaaagttctgatttatatgactatagctctaactgctcaataacacaggcctgtaatctaccttcatttcaaacagaacggtgatttatagggcagcatgccgctttagctcagaaatgaggtgttcaacatatgcgctgttgacataaatttggaatttatcgctgttgtcaaaactgcctgttggacaaaggtgggtattaaggcaataaatggctcagaatagttttctgtcacatttcctaaccattgtattcagtctatttgagggaaaaatatatacttaaaagtaatcaaatgtccaaaatccatgcatcttgttttgaatggtgggaagggaggatgtagggaggatggaggagcatggggccttggggaggggagctggggggattgtggaggagaaagcttttcatgaagttatggcccgtttaaaaaagattccactctgcctcctcccccatccccatcgggaggtgggctttcctttctcatttacaaaaacggggaggaaaaatgaaagctcattaaataaaaatagtaaaggacatttttatgtgtgggcttaaaaccagcaatgtcagggaggagttagtgagtggggctgtgagggaggcagaacaggattttgtttatggggaaataaagcccctggccagcgttggtttctctgctgccttggtgagcgtgggcttgctcccacctactctcccaggttccgaggctcctgtgcacacggtgaatgtgtgctggctgatgagggtgaggagcggtgggtacccggctctaagcaatatgttctactccatccaaatcccgattgatttattacccactgtacagccaagatgcatccacccctcatccatccactaatgctgtgccctttgcaaggcttgagaatacaagatgaatgaggcaaagccctgtcttcatgtagctgcccatccagctggagagacagagaaacaagcagatgcaccctagtgagtacatctgctccaacagaaacacacttaaaagacagaggctgggggggaaagggggtcagctttgagaggggacagaggggagctactggggaaggcttctagggatggtactgaccctcttgcctagtgaaatgtccttttggaagtatcaggttcctgcagggagattacacaaaaatgtagaaaaaatacgctagtgacaggtcctccctccatcccagatgtgtgatgttgtggtcaggtgatcactgatgtgtgtcagtgtattgtaagagtggggccaacgtccttgtgcattgaggctccagcctctcttctcctccatgccatggaccgtcgctgcatcatctaagcacagggcacccaggcgggtagcacaggtggcttagcaaatgcagtcagagtcaaggttaagaatcgatctcttcattctgtttcaagattacatagcatgcagtatgttgttgggtattgtgttgcaccgtgagactgaaagtgtggatgtttccagagagccgctgcttggcctctgtgctcgttgggcctcgagtcactggtattatgcatttcctgtgtgctcgggagccttgcgtgtaaggagcaagaggagcacgcaagctgcctggtgcttttccccatgaaaatgaggcccagcagggaagaggattcgtatttgttgcttttattttatttttccttttatctccatgcccacacgcttggaccgtctcagcattgataaatgtgtgctctcacaaacatgcacacaatcccctttctctggcctgtgtgtttgccagacacacacacacacacacacacacacacacacacacactcccacgcacactgggcatggacaccaattgtaaacctcgtctgtgtggctcaccctccttttgccaccaacccctgtccttttcacacaaagctccctgttgggaaaactcataattttcacaccacacagccttgactggccattgctggaattactgtctctttgaagtgctttctactggggcatttacaggccgttttaattacctgcagcttgcaaagggccttgctctgtcccagcctttgtttgtttgttctttgcaaggagtctgtgtagaaaggaatacggctgacttcttttacaaaaaagaaaagggggtagaaaaagaagtttggggagcccttaacagagcttcttgccgcagcctgctgtgggacaccatgcccactctaacaaggccaggaagagaggctctcgcccttggctgtcttctcagcaggttccagcaccgtgggtcccactcctggagcttgcctgggatatttttgttcatgcgtttatgttttaattattattaagtatattttcaagctttctaccagagacagcaagggctgtcaaatcatgtttccctcactgttgaccaaatcaaagctggcttcagttgagctgggatccctcttatattttcaactaaatctgttcaaggaaggtgcattattaaattattgagtttagacgtgggctggagggtaggggttgaaatcacatatgtgaaaggagtgcccactttgagctgtctggtgtttttctttccttttcttcatttttcacttgattctctaaaaggaactacatataaatagcattctttggggtttctgttaaatatgagtgtagcatgtcatgtctgcagatgaagatgctagtttaccaaagaagcctcagaactgtatcccctttttggggggcttttacagcagaggaaatctttattcatttattcacttagtccaaaaatgtattgagaaattggaaacctcatacattgctgatgggaatgtaaaatggtatagctgctttggaaaacagtctggcagttccttaaaaggttaaacatagagttaccatatgagctggcaattccactcctaggtatatacccaagagaagtgaaaacatatgtccacacataaaacttatacacaaatgttcatagcagcattattcgtaatagccaaaaggtcaaaacaaccaaatgtccatcagctgatgaatggataaacaaagtatggtatatccctacagaggaacaaagtactgatacaagctatgataggaatgaagcttgaaaacatgctgtgtgagagaagccagaccccaaagggtgcatattgtatgataccatttatatgaaatgttcaaaataggcaaatctgtagaggaagatagtacatatgtggttgccaaaggctgggggttgaggggaggaatggagagtgactgctaatgagtacgaggtttcttttcagggtgatgaaaatattctggaatttgatagtgatgatggttgcacagttctatgaatatgctacaaaccagtgaatggtatacttgacaaggataaattttgtggtacgtggaaaatacctcagtaaagctatttagaaaagtgtactgaatacttactctatacagcacaccctggcatactctgaggttatagtggatggtttctgccttaatgtaacttatagtctagtagagataaagaatactaataaaaagctaatatataactgaaaattgtgttaaatgttataaaggaaatcaacaaaatgcaatgatggaaaattgcgttgatggacaacctacctagaagggctgtgggtcaggagcagcctgactttactggagtccagcatacggtaggcgcttaacagatatagggtgagtagcagtggggcatgagtcggcttgccttccctgtagaaggttatgaagtccctgcgagacccacagcctgtcagtagactctgggtaccatcattcaatttactttttttcttagaggcctctctgttcttgcttctattcaattagatggagaaaatcccaggaatgctctcggtgactcctttttagctgctggttttcctgcccctttcagggaaagactctggcttaggtaggaatatgaaggcagaccctgaggtgagaagtctggcgaagtctgcctgtttataggggcaagtaagtcatgtggcctcactttctccatccacaaaatgggctctatactgtccatgtcagccacagggtggttgagatgatcctcaggaagccctttcaaagtcagacatgatctataaatgcattaccttctttatcattaaaacctcagttggggccaggcacggtggctcatacttgtaattccagcactttgggaggccgaggcgggtggatcgcttgaggtcaggagttggagacagcctggccaatgcggtgaaacccccgctctactaaaaattaaaaaaaaatcagctgggcatggtggctcatgcctgtagtctcagctactctggaggctgaggcacgagaatcgcctgaacctgggaggcagaggttgcagtgagtcgagatcacgccactgcactccagcctgggcgatagagtgagattctgtctcaaaaaaaaaaaaaaaaccaaaacctgggttgactagatgttcttttttgcatttttctagaagaaaggaagaaagaaccagtaaggaagctaatatctgtttggcttttgctttttttcttcattaaaatgacaataatgtttacaatgtgatttggtacccgtacaggtaatccgttcaatctcttatcttgtgttcataattgatgtttagagtgatagctctccagctcagaatcctcatagaaaagtaatttaattttcagtgtaccaaagcagaaagaatgaggcaatatacattaaaaaggttttcagaatggtttaattccagaggaactttcttcttaggcctttaataaacctcagttattctcaacaatctctgagtttccatggctggtccatgggatctgaaggtagcattgtgtctccctggctagagtggaaacatataaaaatgatcctggataaccaggagacaacatttccttcgcatgtatccaggcagaacaaggagataaaggaaaagtctgtagctttttgaaaactgttttcccagaaatcggttatttgtgctggttaaaagccttgtacgggagagggagaacaaaaaccctgttcatccataaccatagtttaattcccttatagggccttttaggatctggagagaatattttggatttatttttgtttcccttgggctgacatcatcaagcatgcatcatggtgccctgttttgggtttggaaaaagctcagagaagctataaatcttaaagcattttactattttttccttttccttttctaaaagcacaacttttctggtctcttaaaagaaaaagaaaaagaaaaaactacaaaagtatgtattgatctcttcccctcggatcttaactgccctggctgtaataccttgcttacatctgccaggtttttgtgcagttttgcaacatctccttaatccagtgagcataaatagaacatttcaatcatatttggctaccaggaacttcacagataagcacgctaagaccttgttgaaagagactgtatgagattgtgtgcgataagatcatcctatagcccagtgcacaaatgaaaaacttttgttcttggtgaaatttgttgatagagatatttcaaataaatgacttaggagaacttagtattttaaaacaaaggaccggttacgtagcagccagaagcccaggcctcttggttctccacagccacgaagatccctccttgagcagttgctgcagggagattagtgtgcccctttgtcatttctgacattgtgttttagcactcgcaggcagccttatctgcaagtgctgtattcggtgtggtcatggccccagggagtgccattgtccttcctcatattttcaaggctcaggacagttccctccactcttcagtcagctccagattggccttcatccaggccaaggcaggatgcataggatgcatggctggctggctggcttgcttccttccttccttccttccttccttccttccttccttccttccttcctccttccctccctccctccctccctctctctctctctctctctgtctgtctgtccctctctctctctctctctctctctctttctttctttctttctttctttctttctttctttctttctttctttctttcttctttcttcctttcttagatggagtctcgttctgtcacctaggctggagtgcagtggtacgatctcgacttactgcaacctctgcctcctgggttcaagcgattctcctgcctcagcctcctgagtagctgggactacaggcacctgccaccatgcctggctaattttttgtatttttagtagagacggggtttcaccatgttagccaggatggtctcgatctcctgacctcgttatctgccggtcacagcctcccaaagtgttaggattataggcgtgagccaccgcgcccgcctgcctggctttctttctaagaaccccatagagagcttctcttttggacagtaggggcaactgttttttactggtgtgtgtgtgtgtgtgtgtgtgtgtgtgtgtgtgtatccgcatatgtgtgtagacaaggtgagtttttttccacctctacatttttctcttccgattctctttcttgtttgtttgctcattcagtcaacaaaaatgagcccctgccatgttctgaggtcagtgatgaagactgagaggatgaatctggtatggacccttatgcaggagatataatccagccagcacagacccatgtcagccccacagcctttcagttttgtaaacctggttggaaagaacctaagaaatcatctagctcaacctttgcattgttgcagaggtgtcaagtgaaatctagagaaactaagtagtttggccaaggttatttaatggatatctgcagagccaggtcccctgcactcagcccgatgtatatatatgtacacatatatacatggtcaatataccactgttttaaaggtgattcttaagaaaacacagctggtttggtattttctctctctccctttaaacggttccaaaacaaccaaatggccactgtcttccctaactctcctggtctggatccccagcagagaggcacctgctgtgtgctcccaaaacctgcagcatggaaggtgttaactagcactcagttagttcttggttgtttttcttaatctgttgtttgaaatccttggcttttattggtatatttactttatggcatacataaagagctgtattaaaaaataaattgtgttgtaaaagcattcggtaatgtttattaatattgactagtcagggagcaacgaactctattgctagaaggataatttgtggtaatacccgctaagcattcacagcttgtcaaatgactgtctaatctcaacattaaaaaaaagtgggcaaaagggtaatttcccttatgccttgagaaaatgaaagtgacccattccccagccaacattagaatgattgcttctttttctcccctgggataccaggcctcctttgtggttccaggcagtcccatggctagattttagtggttaggtatccctttgtcttagggtggttggaaattgccttgttagcaatagcttctcatatgtctgttctggctgcctggatctgtgctgaggccataaaagacagagataaagacatagttcttgcccccacagagtgtatagtcttaaggaacttataaatggcttagtcttgaatcttgaacttaatattcctacaaaatacataaggagaatgacactgggtgtgactaatggcctacttagcctggaatgtggtacttttggtggcatgaagagacattccttgggaagacatgatgtcacccttagaaggaagggaacattccccagagtatccctgatgccctatgaataacatggtctggcttagggtagaggccgctagtagaacaggctctgtttagagtattccttttacacaaaaagacacatagaaagtacaggagagctagtctgggcgtggtggctcatgcctgtaatttcagcactttgggaggccaagatgggaggatcacttgagcctaggggttcaagaccagcccagacaacatagcaagacctcgtctctattaaaaacaattatttaaaaaagaaagtacaggagaatggactgaatatggaaacactctgcagtctccctggaagttgctttggggaggaagtactgatagcctcataactttgcattcatcccttcctcttaaaattagagcacagaatgccgttgactatttcacctttcctttgtcatttgaattaaaggtaaatggacgttgaaagtgtgtttttgacttaaaggtctaaggaggaagagtgagcccattgctaaagtacataagctttccctttactcaattctgtgtctacttggaaaggtgaatgaggctagggcaaggttctcttatcaccaagcttaagagtcggttgcttttgcggctgagagcattggcagagctccataaagggacctaccttatgctgtccccacatgggggcccaaggctgcatgtcagcaccaactgcccaggtcctgctcgacaggaccaggaagtttgcatggtggctgggtaagtagatgatcttggagagtgttggttctcatgggggcggcagactttttggagaagagaggatcatttaggtcatggctgggatcttacagaatctcccgtctgcttcctatctattctgagtacccctctgaagcactgagaaggtcaaattgatggtcataggatcagaaaggggtggtcataggatcaaaaagcccaaagcatcggggtgacttttgcactgatgaggtcaaattgatggtcatagaatcagaaagcaaaaacccaaagcattggggtgacttttgcatgtggagtggcctcatacctacaatagggtgagttgggaaggattatgtactgcattgatgtggtctgagtgttggttcagaggatggctcagttaggctgaaaacaaggacaacatcgtcttataaatgcccttacaggatggatttcccactttatttttcctcattcaaaggcgggagagagcagtgggtagtccagctgtggagccctcccattcacttttcccaattacaggtcctagttccccatgctggtctttccagcaaaactcacaggtcagacaatttcaacccttggattattggaactgaggtttctttctctaaaccttccctgcctgttggtctgctccaacttgagcatttgcccctgggctcaggaacctgggaagacatgtgacattggcagtgctgggacatgaacccctctctctcagctaggtagtgctcctgggcttttccctttgacatctgctagtgcagtgagttcttcgcatagccttccccccttggtccctggctgcataggatggaagtgggccgagcttaccctgcagagagtagacatggtggatgcccccttggggctcagctgttgtggtcagctctctctggaagctgaaggtagggaggatggagtatggcttgggtctctccttgctgccctttatgctgctgttgctgttctaggtaggctaggttgataaaggcttaccctgaagatgacaggttggtctaatggcttcatgcttctatgcagtagccattagccttctttgtatggactttaggagccacaggacagggtccagttttgaattggaggctgtctatgaagctgttgtacttagaatattgttaggatgagcaaaggaatgccatagatgccactttacagagagggatttctccagcatccttgatcaatcccttttgaacgaggcctcatgaggaaaggaaatataggcacggtctctgccattatggagtttgctctctaaaccagatgaaatctttatgagtttgcagactcacaatagcacagaaatggttcaaatgatgagcttgtatcttgctagcttcgttttactagtgagagttgtttggttgaaaaccagtgagaaggaatgaattcttctcttcagtttcttgtcaaaaggttcagatttgtttagcttgaatttctcataatgattcagctttcttgagacaatagaaacttgttagaggttaatgtgttctttgtctttttggacataagtgaaaatctgttacaagcaaggtgagtttacctaatgagccactaagagttggggagaacttgagtctgttccccaggaatggagagtgaggacctgaagcatatggggcaatggaatctccactgagtataggatggagatgcgtgggctgtactagaactgggttactttcaaaatggtgttcagcaaggtagcttcttctcagagaagagtgtgtgaaaactctaccaccaactaaggcagtgtgcagaaaggtgcaaaaatgtccccagatgtcttccttcctttcctgtcacagtggaggctgataatctcagatggccacgtgcaattaaaccttatgaaaagacaggactagattgggaagatgtgagtgtgtggtaaggaagaaggaggtggatagaatttccattttgatctaaatgctttgcagttgcataatgtggtgatggtagtggtgggaggttgtggtctaaagagggaatagactgtgagttcacacaaatttgcacttttgctccaggaatcggttggaattctatttccacattggctgttctgcagactgtgccatggagagtctactggtagccaggtacctcaaatgcactgaaattctccaccattattttctttgaattaggagaagccttcacttttccacattcttcctttggtagatgaacaagaattaaagatacgagcaaaccagtgctgggctctgttgaactcccaggcctgtgaggttgttccctttttctctaatgaactttatgtgctttgcccaggtctctctgccagtgaggaaagacctttgcccttgtacttcatgtgaaatcacatggacaccatattaatctctggtaacctgtatggggcactgagttagtgggtcagttgcagggcagtgaccttaccctgaggattagacaggataggacatccgggtctctgaaggcagcgaaatgcatgacaacagagtcattccgaggacaggctggtggtaacttctggaagtttctttcactgaaagataaatagcaagtgagtaaaggaggaaactcaggccacttggattagattttaaatgactagattgctgggattgggtctagaggtttgcttgggcaatcctagcctggctgcctcagtgtcagaggacatcacaatgcaccgtaagaagtgggacgtggctcagggagaataatagtgccccttagaggaccacctggtaggctaggtaaaaggatatgggtaagacttttgaatgataaaattttgtctctattcaaaatatttgatgtgatcttcatcactttataggtgatcaaacacagagagattgtgatagcatgacttgtccaaggttaatggccgagtcaggtgggaggatgcaggtcttctggctgctggctgggcattcttctttgtaccctgccacctctgtagtaaaagggcaagtgcctgtcatctttcacaccaagccaatccagttggccaagataagccacttccaccaactgccaagcaaatccattcatacctagagaaaaggcagtggtgttacccaaaccaagagtgtttatcatggtgagggatttgatttggaaccctcatggagaagagatgggagccccagaggggagtttagcctggtggtggctcccaaatctgaagaccggtcactctagtgtccctttggaaaataaatccaaatgggtgttcgtcctcctattcctcttgacagccacccttcagaagtgggcactccaggagctaacaaacccctggtgaagaaaaggatgaaaataaactgaaacccttatgttgccatccaccagattttgccatgactgtgtgcgagttcacctgccaaaccccttatgaatagagcctttgccactctatagaagaacatctcttagaacagcaagtatctatcatgcccgggcaagtgacaggaatactccaccatcgtgtgtgtttgcatgcactcacatacccctaggtatgtagtttaaaagatactttgtccaaaatgctattaggacatgtcccagtgcccaacattgtgaaatccatttagagttaagaatgttcagttaaaatgttctgtactgttaatatttctcaatttgggtggatcagcatggcaaggagcaagagaacatgggggggtggtacccctacagtgtcatagataagggtgtgtgtgtgtgtgtatgtttgtgattgagaaatcatttgtctttggcaagtggggaaagggaaagcatgcaaacaaaacaatgtgattgagaaagagctctgctgagagaactttgtgtgatccctatcagaaggccgtacacagtggataccatatgctggtcctcatgctgtgggagcccattgactgtggctctagggaggctcacctgggtccaccacatggtcttgacacactgctgggttctcattctgggacttggaagggtgggtggctcggttttgctaccatctagatactgccagcttgagtgtgtaatactccctctccccacctgcagttttatctgttgtcagtaccagctctccagccttttactatggtcttaacacatcaacattttgatggagatagagggccttgttttcccttctgcctgccccaccgcccacagatccggcttctggctgccacgcctgccctgtcctgagggccaaggcccctggggacgttgcagggatggcgcagagactggggcggaggtggaggccagatcctggatccggcaatagcatgtatgggcctgacaacaggagtgtgggtgggcggcagcttggagcctctccccagtgctcggctccctgctagcgcacccggttccctgcatcttaccagctcccgtgctggctcgtgactgagctaggggtctggtgggagaggccccgggttgggggttgggagttgggatgggagcactgctgtaggttgggcctgtgaccggttgttactgggaccttggtcttcccaggggtgataacatgggcctagcccacctcacagaatcacagtaatggcaaaatgagagcatgtgtatgaagagctgcagatgactatgaccaccctacatttatagaatgatgttatccagtttcttgaaactctgctttctgttggggcaagacagagggaagacacttctaaagctgggccttaggggaaaggtgtgcatgttggggtgggtcattgcagtcctaagaacatctggatgccagagaagtatcttatgtctataagggcatcaatttattcacaggcttattcagagcctcctttgtgtcagtcactgtagtggaagttggaggtaggagagagaaaagatacaggtgtagccctcctgggtcccatgggctcgttcacagtcaccacccgggaaaggcagtgctacacagaggtgagcagaggctgtgggcctcctgtgaggtctgtgctagtttgacagtgagcattatgtctgtctgactgtcctgggtgttgcatccttcctccctctggaattggatctgattttttttcttggtccatgtgtcagtggtaaagcccgtggacaagaccaggaatgggtgcttcactggctgcagtccctgggcagagggcgtgatttacgctgtctgaggatccagggatgtgtttccatcggtgccctcctgttcccttccgcctgtcacctgccagagggatggctgccaagcccccaggtaggggatggccctgcctcttgtccagccagagcagcagcaacctctcttttcctttcccttacaggaagctgcacagtgggatgaagacgtacgggtgcgagctctgcgggaagcggttcctggatagtttgcggctgagaatgcacttactggctcattcaggtaggcaagttcgccttagtggcccgttcagatacaggcaaccatctcctgcttgcctttacccctcctcagagcctgctgtggcctgcatgtccccactgcccgctggggccctggtccatcttgttccctggaccctccctccaggcttatgacacagaagatccatcctgatggcggggccacttggatgaacccaccttcaagctctcgtgggtttcccaggcatcagtggcaaccagtgccctgtgtgatctaccttccaaagtagactgcagtttcattagtggaacagttgtggaattaggttctcactgtctaatgaatctgactattgggttcacattatacaggagcctttaattaaatggatatagaaaggttggaacacaaagctggttatagcgtgctgtcttttgcaagttaattttatacaattctattgaggtcgactgtgtggctgctggtaattttgctcatgtttgggcaaagctgctctgccccacgaggcgtggaatggggagaagcacctgacatttggcaggcccgagtgttcttggtggagggaaggatctagcaggtctgatgcggtggctttgaggcttaggtcacctgactttagttgtggaggcctcaactcttctttgccaggtgcatagtctcttccctttaattcccttgccttccaaccttggagtcattttttaggggagaggagagggctgttgtttcatttggtcttgtcttctcctcatgtaggccaaggcctgcctctcctttccccatattggctccagaaactggccctccaggcagtttggcatttgggaaatgggctttggggtcaggcagagaaaggttcaaatcctgtttgtaatatgtgctgtgtgaccttagctacattcatcttgtgaacctcagtttctgcatctgtcaagtgctggtgttgttaacttacataattttttggaggattaagtgacagaatatacgttgaaggcatctgtagtaagcccctggcatacagttggcatttaataaatgttaatggtttctgcttgcaccttcctccctcatccttgtttctgagcctgttgccccggggggcgtgtccccatccgctcgttccctgcctgcctggccgtttagtactgtctttcccctgagcccatcatgggtacagtcgtggaagtgctcttcgttcgctttttctgcttcagctccccactgccttgctgcagggcccatgtggttccgcattgtgttggatgtggtctctcccccggccctcatggcccttcctaaagcgtcctaactccttctcacttcccattcttccctcttccaggcgcacggatttgtccacagcaggcagctggcagctatctctctcagcgcgtctactgtccccatgtcttcgtgcattctgttcttccttcctgtgggccctccccaccctgcccctggctccactgaatcatcctcctcctgcccatgtgtctcacctcagcccagagccctaacttccaggcatttctgcgtccggatctgcttgacactcacgtacactttttcttctgttttagggacttacaccttgtatcttcatgcttcccttcagctttgtacgctacttaaggttcagagtgtggcgggtttcatgaactatctgcctaccaggttggctacccttcccttgctttcttggtcttgattttttctgctttagcccaccactgccttactgcagagtgtggtgcgtcctgccctagacccctgtgtggtgctgggcacttctggggcagtgcacttctagcctgttggtaaagcgtctttgccctctcagccgcagtaagcgtcctttcttattgctctttccttgagtccagtgctgtagccagactcattttcttggtttgctttatgggcttgttgctttctgggctctgtggctttgtttgccccattctgtctacttggaataacccatctcccatcttcccagatcttccaaggtcccttccatgatgccatccccagctgttccccacctccagccagaagcagtcgtgccttttctgtgcccatgtttctttatttgaagctatctttgggtgcagtttttcttctgtgttacagttatttatggacttatctctcttacttgggaggcggggttacatggtggaaggaatttggacacgtacctactgctgatgtgatctggggcaagaaccataagctcttacagcctcagtatcctcatctgtaaaatgaaaatatttaacgctatctcggagaagctgtgaggctcaccttgaatacataccaccatagctaacatgtcatggggttagatcctgtccacgttatgtccagcacactgcctggcacattattggtgccaagaagtatttgttgagtgaatgatgcagcctgggatgccgatgaacagggacactcctctctccggacaagtccctcctgtggtaggaactgtttatgtcctaaggactcactggaggggacagccaggagcccctggctcgtattgtatccctcttccaggcggtgtgacccagtgtgagttagccagtgtctctgctgtgaatcacacatcagcagcattggtggggctggtggaagcggctgcagaaaagaaagggttgcttgcatactcatgtcaggtgggcccggtgtccccagttcagacaagagtgtgactgtgcaactgccctgcggagctggcggttccctggggaagctgactttggttccacctgagatgctgcttccaggtcccctgatctcatatggctgctccagaggctttgggagttgggtcctcttttcctagtttttcctttccatgcctgtcttactgggcactgaaggctgattgtgtcaaatgatttgtccctctgctagtcacttgccaatgcccttggaaaggatgatttgatgattaggcaggtgcgatgagtcatagtagtgttttaattcacccttgcagatagctcacggcctatattctgatatttctattcttttttttctttctgttgtccggcatactcctcacctccgtgctgagaggtcttgaaaataaaatagcacaaagggcttagtgaggctagaccatttcctgaattgtttggccactgttaaacaggccctgggggcctctggagtgacctggacttgttggggagttggggtcagagggctgggctggtggctctgggtcttcttacagattccagtagtggtttacatgttctgatgcctgaaaacagaactaggtgatgttttagaagagacattgaattagatgatgtgaggttttcctgctgctctattttgaaggttccatgaagaaagctgacagtgagaatgggtgtgccaggtctgtagagtagacccattttacagatgaccaagggttcaagcagcccacagcctggaagaacagtagttgctccagaaccctgggcgggggaggcgggggggaggcgagcattttttttcaaaaggcgcaggctgtggagaagtgagtccaggatctgggtaggggttgtggttgcccccctaaatgttgctgcccttgcactggcacattcctgctgttttcttctgctcagcggagccgaacggctctcacttcctggctagctctgtgtgctgccccaccccctcttggcgagcattgcctgtgtttgttattgtagtcctggctccaggccaggcctggctgcgagccagacttgtgggtacagtatgtacagtgagtgctgagccaagtttgtcatcatacaccattaattttttttttctaatctggttggggtggggtgaaggaggaggcaagaaaagagtttctccgatgcttgagaataggccgcattgaattccgcagagatgtcatttctgaaaggcagacggagctccggcttgttcttccttcgcagtttttcctcctttctctccctgtcgtcctcctctcctcttcatttccctatcacgcgaaatcagcctgcaggagatcgacaatgcaggtcttattttcagtgactagaatactaaatttacactgctaaatcagttttcattgtgttgaaattgacaatttgtttaattagaagtttgccctgtaggaggcccttctgagagacagtgccttccctttttctctctcccttactttctgttttaagggtttttaaaagagcctaaatggtagtagtgaatttcagtttaattgaagttttaatttcaattcgaatgtgtgaattaatcaagtgtttatgggctatacctgatgatcacaataagtttaaactaactatcaataaccaaactcattaactaatgagatgatctggccaggccctgcattctcagaggtggttttgggggtcagaagggtttgcgtgttggggaaagaggcttggggtgggaagagagatgacctccaaggctttgcaaagctagccctgatggagggtgaagcttgggtgtaggactgtggcccttccccttcctgtgtcccaggaagactctgaaacctccctcctcaccctctgctaccttaccccttttggggatctggcattgaagcatctgttgatccactgtctcttcgccactccttgtcgtaacacgagaagtgattcctagctctgaggtgtccatgcagagaccacagacacatgcagtgactcaaattggttctgagatgggccagtgtaaggtttcccattaggtagatttcccacagcttggcttaacgtcctggtggcttataagtgagcatgcctagaactgcttgtccctatttttgactcggctgcatacgattagggtttgagtattcatgtggcctgctcctattctgggagtgtcattcatttttggagccagaggatgtttaataagcacgaattgtgtgtcaggctctgtgcacttaacagtgaagactgctacaacatccctgccctcaaggagcttaagtctagagtgggagatgagtatgactatgcaatcatcatacaagatggtaatgtgtgcaaagtgctaagaaatctaggagaaattcagagtaggagagtgttttgtgccagagggtaacagaacagcattttgaaaggactcggtgaggggaagccgaagccacctatggaagtgggtggtgtaacctgcgagtgtaggctgggcctgcagggagagagcagagtgcagggtttagaagagatggacgagatacatctgtggaaggaatagcaaaatgatctgcattctccctgaagcactggagagccactgaaggactgagtaagagggtgacatatttttgtgtctggaatagaagggactgttgggcttttttttatgtagactaggctagaatataaggtgaataaagcctgttggagaacttgaagactggccgtctgtgttggggtgtggctggagtgttgagaggcctgtgccttctgtgctggttagggccctgtggccccattctgccaggtgggaggccccatccttccactcctctcttgcccttgtcaggcactgtaggccctggctgttgagaagcatccctgagatgaggctcttccccagagttagagccatggggaaagaatgaaggctttcgttgatagattttctgatttcagcagcagcatggagtggctggggcttatcacctgggacctgggtcatcctcctggcagggaaaagggctggaggagtccttcagattggatctcttaggctttcctctgtcgcggttggacggaagaagaaaagcattacaagatggcaaagatctgtggcttgtccttgttctgttttatttatttattcttttttggagcactgagctgtgggtttcagtttcttctcctcaaagacagagaagatgggggaagagaggtagctggaaaattccctgtgactgggaggagacagtgcgaggtggtccccacgctgatgatgggagaggtgcctttgagtccaaagatggcttcccctcatcttgtctctcctcccattcacctctctcctcccagattaggtatctgctcagagcaagagacttggggctgcccaggcttgtgagagcccatggccaatccatgcaccctctgcccactctccagtcaataccagctatcccttctggttagcttcctaccatcagggcaaacccgggagatgaccaggaagaaacttcgttcatgttccttgactccctccacattccttatgtgggggcgcctttggtttttgggtcaaggaagtggagaagatcagatgggggtggctcagaggccaggctgccctcccttcggtccgcatgggtgatgcggatgcagagagtggaaagggtgaagggagccactttcccccagctcgctcttgaacacacttctctttctctctctctccctactctgaatttggcttgcttcccgaactttttcccagagtggtgtcgtcactggcctgccggcaggtctggatgttctgccagcattccagagagtttatgatcgcttgcagatgcgcctccaagaacacactgtacccaaagcagaaattaatgcaggcttgactaccgtccaagcccgtacacgggagagaggaaaaggaaaacaaaaactgtttaatgctgtttataaattatacactggctgatgaaaaatacatttctttcctctccccttttactctcccccctatccgtcctcagtccccccccaaccccacccccaccccttctcgctttctgcctcaagagcctaaactgagaccagaagaatatggttttgctttttagctcctgttttggctgggatccgaaaccctgctgctgattcacagccagagtatttttcccctttacctgatgaaatatactgattttccagcccagatggggtgtttttggttttgttgtgtgggttgtttttgttttttttggtttttgttttttggccagggattttgtttacagcaagtatcaggttccatgatggtgctgggtgcgatgctggccccagggcagataaatcccccacgtaactgccaccttagtgctgcggttttgcgtgcctgggtcccccggtcctagtcaggccagctgaaccgagaaagttgggaaagttcattgcaggtcatggttttaaacagtgttttcaccagttctctcccaccccttcacctacagcccctgtgtgaagagggggttcacatgtccctgcccccaaatacacatgtctctgtctccatatggtgccttagcaggggttggggaagctcgttccatctacccctctggatcccagcatctcctcccaccccgcaaatcccccatcccaatttattctataaatttgtttccacattatgtctatccatttacatggcttttgtgttttttaatactgctaatgtttatcgtttgcccaacaggctcgacagattttgcttcctgtagagcatcgaggctttagagccccctcgttgctaagtagcagtctccctgtactgtaatgggctgattttgtattctgttcagcgctgtatcttatttttgtatgcaagacaaagtgttttgatggaggacgattgcggcagtgtctggaggctgtttggagttttatgggctgtacagtacactgtgtgctctctgaacagaacacaggctgttgaattttggattggatttgtcatttttcccccctcagagaggagcctgtcagatagaacattactttgagggtggagggaagaaagtggaaattatgtaataaccttcttccttctccctctctcgatgatttttctatctcagcatagggtggtttcttccacacaaaccctgtctcatgccaccacatgattttgcacagctagaggatgacggtcttattaggaaatgaatggtgccctagagggatggatgctgggacatctgtctgtctgccatttattctcctagtctccctttcctctcctttgctcctgccatccttcctacgttctgggttgccttgctggtccttgttattgtctgaggatgaatagatatggggttattggggagggatatttacgtgggatcaacctgataatggcaatgccatttctgatttccagggccttttcgtcttcccttggcttcgcagacacacaccctgccggaagcgttcttaggaggcctggccgtgctttctcttgccctcagccccattccctagccctctaaccaggctgggcctgggtatctgtatccagggctgtgcctgaggggccccaccctgctttgggcatccatcacgctactgcggcccttactttcagtgctcttgtccaggtctctgtggtggcaggtatttatttttcagctcttctcttctccttctatttctccccaatctgctttcatctcacttcatctctttgtccctgtcctttgtgtctgtgtcagcctcggccttttcttgacactcctgtgtattttctgtcttccttcttatgtcttcatctgtctttgtctccatctgtcttcgttggtcttttctctgtctctctctttctctgtctttgtctctgtctctgtctctccctgcctccctgcctccctgtcctaacccaccacctcaaagttttttttagcttggaagctgggcagtggttggaatggaaaacaaaatgtcactctggcccagaggtctccccagaggggaggactcttgagccagtgtccctagaatgctcccagcacctagaatctcatgtgctcttgtcccttgcctctcaggggccagagtggggcttctctggcttggcccctgcttttcccaggtccctggatgttccccccaaatcccagttgtgttgagaatgggcaagtagtttagcagggttaggctttacaaggcccttattggactttgctggtactgtgctctcctgggccagtactgtgcacctgagtgcaggactcagcagctgccctcacatactcatgccctagcaaagtgcctggtacataggagtgttgtgcactgatagtatctgtcaaataaatgaatatcctgttataaaagtgtttgtactactagggcagatctgggtttggtggggcctgaagcgtactcagttttgggtgctgtctctcagaaaaggattataaataccaggtgttagagcctctcccaggaaaggggtcagtgccagggagaggcctgaagcttcagctttactggcttccgggagaacaggcctgggtgaaccacttgagaggttgctgttgaggggtctcacttggaactacttagtggggtggctcagggctgaggataggagggtgtcatctgcccagctctggggaccttcagaacctgggacatctgtgctcacaggcctcaggtttatgttccatagaggtcaagcctttggcaaatggctgcaggtcgcaatgggcctggaaacatcatggtatttcacatgctcttctcagtgaggttgcttggtagggatggaccctgagttccagctcacccagagcaaccaggtaggcagccactcttggtagcatcctggcctccacactaaccctcggtgactgtcagtgaaatggcatggcattcactcctctcccaggtgttcaactgcctaggtctgtggctgtggctctcctgcgttcttggggcatagaactgcaagtatcgtggggcagaggactggtctacgtgtgtgtgtgtgtgtgtgtgtgtgtgtgtgtgtgtgtgtgtgtgtaaccatgagggagagggggcctggaggtgatggaaggtgtttgcagacatctgggcatctgttctgtggagcttgcagactcatccattaaatgaggttggtgaagattgcaggattggacagtcctttgggtagagggactcacttgttggagggtatggaaaagctgcagtgtctcctagaaatcggggacacagtcctaatcagaacaccatgtgtgcatgtgtgtgtttgtgtgtccaagcatgggaacaaaaagagattgagaagaagcatttacatgaaatactcaaatttgttcctttgctgtaatgggcccgcacagaccattaccttgaagatttaaaaactaaatgagctcatcatatcgagtgacttctaccgacattcatgcttgattgcaaagcctgctttacctttgaatttcaacttcattgtttgttattaattctcagatggtggtggtgtgtttctaccttttggattcagccatgaaaatgttgattttgtgtgatggatgtgaacatttctcaacaagaccccactgaagaaccttttcattttaaaaatagccccatgacctttggggctcagactggagtttccgaggaatccagtgggctgaggcaaggcttgggttgactttggagggggcagaagtttgcatttttttgtctaataatttgagtttcatatgaatgattctgtgctccgtgcaatactatgcattttcataactgtctctttcactttgggtaaaggaagggagggaaaaaataacagcagcagcattctgtgggcaaaggaagaaaacaagagaatggggcagagaacaggctaaatttaaaattgtaattggctgacttccactggcttgcgggtgttttaatgactcataataacttcatttaaaaccagctgagcagaaaatagattggagaggagcctcgggccattatggatttgtggtttttttttttttgtttttttttttttttttttttgacaagcttggttttcagcagccaggaaggctctcagagagggcttggctgtgttttctctctctctctctctctctgagggttggtggtctgcccaggagagattgtatagaaaccagggcgagtttttttgtttttttttttttttaaattctccctctaccccttgcttttttttttttaactgattaaaaatagatgccttgaggtattattttagcatcagtaggatttttttcacctttgatgtggtaaatggaacataaataaaattgtttttgaaattactgaattaattaggtagtaaagcaaccacaatgcataaatgtccttggccgtctggtttttctccctaaccctgatctatatttgtagggcgttcccttttctccccagccccctcctgctctcccagcgacccctccttcctctgagcctgcaccttccctttgaatggcaagattcttttatcatcccggcaacagctaaatgattttttaaaatccataggattttgacagtattggttctatctggttatctgatcagctccaggagttttgggacttgccagaaaaggctctaacctggctctagttgttttaaataggtcctgcctgtttcccatgctaggcctggtgcccgaccggcgagcgttcctttttctcttctcttttgaaaagtcagccgactcagccctaggatgtgtctgtctgggcaggacaagaggccgccctccatctgatcgctcttagccatttatctatcccctcttatggcacctgtcaccttctttgttacatagctatttatttgcttggccttttttgcctactagactgtaagcttcttgagaacatgtgatttatttgtgtcccctatactacctcgcttagtaacctgaatggtggttataactcagtcatttgaaaaataacctaatgggtgagtgagcaggcatgcggatgggcacatggtaaggaacagacctgaggtgctgcctgcttccctccagccccaggagtcagcaatctggatgagaagacaaggatggaaggcggggaccttgtcagtagtgtgctctgttgcatcctcacagcgggacacatagcaggctctcaggaaatatctgttgaagaagtgaagggctcaggatgcatggtttggctgcaggaaggagagaaagacatttattgaaacttgctgtgttccaggcacagtgctatgtgttctgcatatctgaactcagtctttcttcaactttggaagacagatatgctgattccgttttgcagatgaggacagtaaagagttaacttgcctaagatcataaagctagaaagtagcagagctggacttcaatctccctctctttctctctccttccaccctgtgtcttgcttttctattatagtatagcatgctgctatacctagccctggcctcgtgctgtttgagtgcctaaatgcctgcttctctgtttgtagagctaaccaatctcaaactggggagctgagaccaggaaggccctgtgcccaagggtcctgggggtggggagggtggcatagtaattggctgctgcctgtgtgccttgcacctgtgccaccaggagcaggtgtggcttattagcctcttcctgctctgccagaggagcatgtgttcagtggttgtgagttgtggctatgacttctgctcagtgccttgtagggttggggataggagggttctgggagccttgcaggagggtctgtgggttagtgtgtggccctcccacccagggagagcttgactgtgtcatgccccccactcctcctttgcactatcctgccaagtaggaggggtaggaggagagagctgcctgtggtccctcctgcatggcgacgcaactgggtgctctgcttctggtagatgcaccctgtgatgctggggtggggtgaaaggggcagccgacctgtgctgcagcccagaaatgtgagagctgtgaccacttgggctattactagcgccttagacttcaagcgtcttggagtatgatgcatcaggaaggttgggcctccctgacctttcagattatgtccagtgaagctggaccacttgacatgaggctggttgtgtccattctctgacagcctcatcttccccaggcacgcgctggggatgctggagctttctctggggagcgaaacatcagccaaatgggaaccagatggtgaaggttgagcagcagagaaacctcgatgactactctgggtcacacgtgtggccctcttttgcaggaaatcgtttgtgaagtcattcatcagttagcaactgaacctagggccagtggtgtgcaaagcttggcagggtggacagaggggttgaagccagtgtccttgtctgcaagaagctggtggtctggctgagagggtgacacgagccccctggcaagagaaggcgttgagcaaggctgggtgtgctcattgtgaccgcaagaggaaagactgagtgctgcaggcatttagagtggggagaagctcctaagaaccaggggaatgaggagagcttcgggaaggaggttcatgggattttgatgaggtctttgctgctggagtatccagaaggagtgctgtggtgggagtggcctacctttctggacaagaggaagcaagaacttctgtgagctagaaccatccaggcaggcatctctttcctcctcatcctcctccgcccatagccacctggcagagacttagagcccagtttcttgcacttgggagtcctccaatccctgtgatggctgtgggcctccttggcctggaggttgagaaacactgcattaaagatgaaaagctgccacttcagggggcccctccaagttgaggcatccataaaacaaacacatgtgaaagcaaggcttaaaattggatgcggacccagaagattgtaaatttctcatataggatttgatggactaaaaaatatgttacgagtacctagaaccccacaaagcctaggttgagaagacaggtcagagggctgcctctgggtgaggctgaggacagagttggccaccctggagggccaatggaggaagcatccgaggacggtctcaggacgtgccccagcccacctcctcggaccacgtgggtgaagcccctgtgtatgcctttagtgaagactgagcttgttcaccgcgtagatggaagccagtgggagagaggggcggatacctctgtagtcaggggctccttttgttggctctctccaggattcaacctgacaaagacatgtcttccagacttttccccagtagttaacgcactccctcctccttcccccaaaccagtcccgttttgattggaattctttcacttgcctgggacaaggggaaaaaaaaaaaagcaaattctaaagttttcattaggtagttgggataaaaagtcttctggggtagttggattaaacttcagcagctctcttactgactattataagctaattgagcacagggagctcattggcggctgcatttttgttggagtaattatgaaagaccacagtcattttcagtaacaaggtaactccgggtaaagacagaactctctgaaactttggatttgctggagtcttccttcctcagttgcctttgctaatatgagcccgggataaaggcccagagaccagatattttgggaggctactatcttgcctgaatatcccggatctcccagtgccttcattggggcctaatggacataatccagcacatctgagagagcactgctggggggccagttttgcattaattgagatttggggtctggagtcagaagctctggagtataggctcgagagggacaggtgcagcctttgaagctgacccgggagcaaagagaatcacagtgcactgtcttcattacttatttatgcaccaagagcagggtctgattatagataatgaggccgaatgatactctctgtctctaatgaggtcctgtctgtcctgtccgagcaaagcgtggaccagcgtatgtaggactgtgatgacaaccctggggatcttttctagcccataggattcttgatggggaaacattcctagacatacagtcctcccactgaactccacccccatccagaatctctatcaggagctaggagccggctcagtgggctgggaagggcctttcagtgccctttggacggggccctggggccttgccaagctgaacgtgtcctctgggtggcctgcctcacctctggcctgctgcccatcagcattgaatcatgcccctcagaggacagcatgtaactgtgcttcccgatatagcccccggccccccaaggtgacaggaagagtcattgtcacgggagtactccatctttctgacaccacaaggccggcgtggctttcttccctactgctcagccctgcacagcctagaattctgctttgggagcatacatagagttcacagagctatttttttttcctactctccgtctcccactttagttttcagaactttatctcagtctctggcacggactatctgcttccttcctccatctcaacattataaaagtttgtcacagtcagaggctggctgaatcgaagcagaaatgtggtgtttggttaaattgtaaaattagctaggaaagttaatgaggcgttccgcctctgcctgctgaagagcaggacgtttatgaaggtgcttcaaagcaccctgcctgagaaggaaggaaagggagacaggagcagcaggggaagctgcccaggagtgtagaagagcctggtccaggtgagtttccaggccttggacgtgcctttcactcgcttagctgaatggaacctgagaaatcatcccctcaatcctcctgctgtgggtccagctccatctacccactccgagtccataggagttccctactacatgtccaagaatgtcctgcgaccgcacacagctggccatggttagccattctagtgcccagatttcctttttgtcctgggcaaggcagaagagacaaaaactgaacactttgccttagaaggagcccatggtagaaaggaggaaaccagagataatgacagtggcagctgacatttcctggaggcctacaggtgccaggtactgtgccagattgctttacttcgtcatctcatttgagcctcacaagacccatttcaagttggtactgttaggacatccattttacagatgaggagactgagtttacttgcccaagatcacctagcaagtaagagacagagctgcgctgtgaccccagggctgcctgaccctgaagcccctggtcttaacctctgcggcaaagttgtttccatcccctttccaggctgcccatttctcccagcccacagctcacgtggtacagattgcacgtttgcagatgctcaccctgaagctttggaagtcacggtctcaaaggtgcacgtggaagagctgccaacagtctatttcctgcacacaccaaactcgcaggtcttctaattacaccaaacaaacctttctgttttcaagcagctatgggcttaatatggcaaatagtttcccacctggacctctggcatgggaggagccagaaaagacgagttttgttttgttttggtttgtttttttccggcagggaggtggttcgtacttagaataggcattaagtgtggcaggcaatatttctgttttgaaaagtgtggcatcttaaggctgctgaattttgagcctgcaaatgtcagtgccgtagttgtaatgtaacacctcaattatggtgcagggggtaaggaagccagactctgaaacctgcaaggctctttagatccacagcctgagccacaattaaggtttcagaaacaccaaaggcaagccaatgagtgtcatttttaaccagtttgaacattttactacttcctaacatcagaagcacccgggctagagagcccgcttcttgtcctcaataaagtgattaagctgaatgggtgttggggagtattattaggctgagaagggctaaaaatagacatgctctgttttctaaaagccacagcaggcctggagagactggcagcatcgaggtgccactgaggggcccaggggaggggaagggagggtggcagtctctggagctccgtgtctgagatggggatggtgggtgttgtgacgggtgggtcaggtggtggggcctctttcccagctgtcaccaagagtggaatcacagtggaagcacatccgtacccgtatatgtgtattaatgactttaaaggaactgacaactctggagtctctaggagggatgcctaggcctaaaatttacgtactcagccccaagataattgaatttacctgctgttctgggagaaggagtccaatctgggcagtgagtaaagggcagactataaggggcacaagaagagggacatggggaagagcagaggcctttacagccgagagtgaggatctgctcgacaagccttgattaactaggatgctcagagaagatgtaatcaaaggactttttggtgaactgaaggttaaccaggaaaccttgtctatatcggcctttgtcgtttgctatcattcatcaatgtgagagtccatttttctactttcagtgaatgcaactgattgtctttttatgatagaacatcttgcttgcttagaagtcaaaaggagaatgcctaagaagggagttaagcatggaggtatatgcctagagttttattataagtcactctagaagatcgtttgtacgttttccttcctacatgttttcatacctttgaactcattcctctctataatagctttaagtgctgggaggggcaaggaacatgacttccactttgtagatggagaaacaggccaagaaaagtaggatcttagaatacactgaggtctacgcagaggcaagtctagaccctgtgctgctcccagcccaggctctgtcggatagacagtgttgtttcgtgcctggaccaggaggtgagagtttttcttaataggcaaaggactcagagaagagagttaggtgggcttcccatgctgccattctgactgaggttttttttttttttcttttatgtttactagctatgagaccttgggcaagagaactaagctttttaaacttcagtttgcatatctaaggccaggcatggtgtctcctgcctgtaatcccagtactctgggaagccaaggtgggcggatcacctgagatcagaagttcgagaccagcctgcctaacatggtgaaactccatctctgctaaaaatacaacaattagccgggcgtggtggcatgagcctcctagcatctctctccaatgccacttgcaactgtctttgtagtgtgtatgtgtgtattttgtttctaagataaaacatctctaggtaatatttcaacaaatgaaagaaataaagccttttagaaggctcctgatgctgtcacaaatgtgataatcattgcactcttcaagaaaccaattggcagagctctgtatgcaagttatctgctgacaattggctgtaagctgtacaagccctgtagatgagagcttctcttttcctggaaactccaccaggaagccgtgccatagaccccaaagacatccaggtcaagctgcagggaagaggcagggttcagtaggcatagaaggctgtctaagctgggcccgtgctcccatcacaggcagtttagtggagaacctgggctggatgttgacagaactgagatgttagctcagctacccactagctaaatcaggagcgttagcagcttaactctctgagccttggtttcttcacctgttaaagagatgatgatacatccttcctatcctaaaagcaggacttcaaagttgcacaacagcagtgacaccactcactcagaaatgggactgtaaggttgttgaaggtttaaacaagatgatgcacatgaaggtgcccagcacagaaagtggagctcaacaggcacacaacaccaatactttcactccttcccttccaaggaacctacaaaggctgccctgcaataaggagtcacaatgctgctgctgccatagtgttgacagtcatcacaataaaaatactaataacatgtgttgcccattcattatgatgcaagcattgtgctaactactttacatgcaatataccagttaattctcccaacaactctaagattaccccccattttatacatgtgcaaactttttttttttttggagacagagtctctttctgttgcccaggctggagtgcagtggcgtgatttcagctcaacgcaacctcctctcccgggttcaaatgattctcctgcctcagcctcccgagtagctgggagaggacaggggattctgagacccaagcaatgaaggaattatcaatattgagatgccaaagagatctcagcattgtgagaggactcggcattctcttcagtcagtgggaaatgagggaggcagggaccagcctggagaaagtgagggaagccaagaatgccatcgagactgaggaatgctgcctcctattccctttaaaatacctccaatgaggtatgtcatttggcaggagtgtcaggagatgctgggggaccggggcagggccaggttatcagcttgaaatgggtggagtaggcacttggatcccggccaccacccttggaggggtcttagtcttcttttttccattgcccagccagtattgtgaatcctactcaggggagaggggtgtgtgtgtgtgtgtgtgtgcgtgcgtgtgtgtgtgtgtgtgtatgtgtgaaatcctccatgccatatttagggtgggggcctgtgacggagcattctgaagttgcttcagaagaaaggagcagaatagatgaggatgagaggagaccgaaggctcagatcacaggctgagctttgggactgctgggggccaacagaaacttctcttttcattctgaacttctctcctgagaatccccaaggggagacctgggaggagggtgattgttggtgtttaggagttgcggagatgtcccataaaatcatggcagaaacccttactcttatatccctggctttattatccagcctctcacaaatgccaaggttgcaaagctatctatctctcttaaacaaaacaaagttatgaacacttgaaagcccaggtattccctggaactcgggtcagtctttggcacagccgcactgacccagcctgactctggctaatgattctcccaatgtctggactctctgttccattctacctgcctgatagagcagaatattcaccttgagaaggattctgctggctgaaccggggaacccagccctcgcttggtctcaacagcaccttccaaacaccaagggttgtatgcatttgagctctcgtgtacggccacgtttaactttctttgccatgagcgcccagcttctcatgaacacctgttcatcctttctcccttagagatgtcccagtttaaaacttgtcatttcaagatggagagataaagggattcaccaagggttacacagctcaggcagtgacagtcaggaccgcaagtcagtttcttttggtactttggaaaatcttgggtgcgctggccagcagaaccctccttgagccaattatctaccctgtcttacctaagggtggtcctgtctcccattccagatagcataatatcatgtatacgagagccttagagaacatagtgtctcatttatgcaggccatttacttattgcgattgggcttctcccagagctgtgggactggaaatactatgggctgcataccctgtaggctgtggccaggagctgtcctcctggagctcatcagcttgatgaagtgaaattattctataatcatgataatgactgtgacttgagcacctgctatgtgccaggtacttcatatagtttcttgtttaagctatcatatgaggatgaatagctacattttcaggagggaagtgaggctgcgaagttgatgctggtaccgtaccggtagaaccttaaagccgtctctggatttgagctgttgctgttgccaggctggagtgcagtggtgcgatctcggctcaccacaacctctgcctccggggttctagcgattctcctgccccaggctcccgagtagctgggattacaggcatgtgccaccatgcccggctaattttgtatttttagtagagatggggcttcttcatgttggtcaggctggtctccaactccagacctcaggtgatccgcccgcctcggcctgccaaagtgctgggtaattacaggcatgagccaccgcacccggcccgggacttcattttgagggggcctgaccgttaacctccgagagatctctcagttggcaaagcatgtctggaaggaagtctggttcatcacagcagggactgacattcctgtagtaagagagattttgtgcccttgtgctgactaccacaataccatgattgctcagtcatagaagttgccaggagaagaaagagattagaagcaatggtaaggtgaacccctgagtcactactcttagacttcaggaatatttgtaattttttttggagacagagtatcactccgtcacccaggctggggttacaggcacaagctattgcacctggcctgtatttttaaaaaatctgcaacaaatttactatcctacttgcattttatttaaaataattcactcatgtatttttaaaaacataaatcatctcaaactggtttgcattccctggttcccttctgggtaggcagtaggagggtaataataccattaaacattggccatgagtgatgatgggagcagacggtaggggtgtcatttccttgatctcctcctggggaagaatgatctgaccccatctttactggtgtgttttggctggagaggtaagaatattttaaattgcgtgatatatctcttgcatgcatttgatgtttgtgtgtgtcttataccttgctattattttatctcctgatgacaatgatgatgttggtcttaatgacaactagcatttattgggctattattgtatgccagacagggtattaaacactttacatatattatttaaattaatcatccctcaaccaaccctgtggcataaacactctgagcccagttttctaggtaagaaacaggcccagaagagataattcacttcttcagggtggtagctagacatggtagaactgggacttgaaccagagtttgtttgattccagagagcgtgctcttcactaccttactgtgcagcttaatattgagtgcatgtgtgtgttctggctgtggacagtgtttctaagcctgttggattacccgctggtgctaaaaggggtaacaaaagagctttccaagccactctggctgagaattgagttgcagggataagggacaaggtagacctgtgtgctccctgtgggacttgagagagggactgcaggatcccagtaagagacaagggcaccatgcagcttcctagtagcatcacatttattaggtaggataagaaatgttccctcagccatagagatgtctcagcatttcctcctgacccagtccagggtttcctcttctgcagagtggatatttagccacacatgaggtgtcagtcatttgccaggtcactggtgggacactggcttttggagatctaaaaaccacctgtcctcaatcccaggtgactcccgttgttctgttgctcagcccaggagaattccctggtgtctttctccatcctatatttatgtggggtcctgtatcattagttcattcaccctcccatcttgtagtgagtgaggccgaactctgaggatctttccccacagccttgtcaaccacagctacccttgaaccatatcctggacctatcaatggggctggttgttttcctttcagccaggatttgctcacctgctttcccttttccctcttccctgaatctgtgtatcttccagaaactctggttctggatcagctttttgttttgttgacaaaggagaaagagcaagagagagagctagagagagagagagagagagagagagccttcaagctcctctctgggagtacacatctccttgagggaaagaacacacagtgccggcctttggaattggcagccagtgtgctgttctccgtctgataagaggtactgtaaataaaactgtacaccatggcctgttgtaaaatgccctgcgtctgtactcattgttctgacagcttatgctttttttgggtctgctgttttggtacactctgtacttccttatgtaagcaggcgtgcagatctcatcagaacattcaagatgtttattttaaaatctcaaggaattttgaaaaaaaggacacaccactcaacattagatgctggcaaacattaggtgttttttcagtggttcttttttttctcccttcttattattagcatgggggtgggagaggctttggagagggagggatttgaatttttttttcttccctcattggcttctgccttatttccttcagagagacaccaccccatatctgattgcattcagtgtcttctgcttccttcctggatgccgggaccccctcagcctcatttctggttagggcaggtagggagggaggttctttgacaagggggagagggcagctgcagggagcttgacatggcttccactggatttcagctttattgtcattgggatcctgggcatttagagaaagctttatgtttttgaaagtgccctgctggctgttccctcctttgattcctgtgagttggggtgatccttggcacagagggagagctgctcccacacacggaggcctcagtcccgcctctggcatgtgcgtcctgtctttccaccgaactttaactggctttgaaccttcctccttcctttatccccaaccttctggaggtgtcgggaagtcagggaaaaaggggagaagagtaggagtctggagaacccaaaatggtcagggagctccctacagggtggtgcttagaacatcccgaagccctcatctgcagggtacctgggagactggtaggggcaaggatgtccgcctgtctctttcacaactgggtacctggaatctcagataaactcagtgcctggggtagggagtagtcactcggcagatcactgcctggggggcaggaggctcactgactgtagcggagggaagggttgtttgttggctgccacagtgagcattggattgggttgggagcagacatgctgatgagagggagatctcacaccagaagaagcagacagccccacttcctaacctttcctcccttttcctctcaactacctgagacctagccagagaccatgtccttgagttttaaatagggggtagtagagaacggagtgtgcagaataaggactctgccaccccctaggggacagacagcttggcagtgccctgagtggccattgcgcccttcccaggtgagttctgcacccaggaacctgcctgggactttctttgtttaacaagcatttagtgggcacagactgtatgccaggcatggcgcagggtatcagggatatggtaaagcccaagacaggtgggaacctgctctcacagagcttacagtccactgggaagatggaagagagctccaaatacaggacagttgaatggggctccaggggcttgtccagagaagatttcagagccaggttggtgaatagctgctgatactgacatattggttcgatggcagatttttctgctcccctcaacaaaacaatcactcatctttaaattagaggaacaaggtggggtgtgcatgtgtgcgttcatgtatgtgcacgtgtggtactgtgtgtctttatgaatgtgagactcactttacacaagataaatggcccccaaataactgtacatccaattccagtaaaatcagtcatactttaatcgcatgaagggagctctttctttaaaggaaaagtgactggagaagatggtagctgcgacttactggttctgtatatctacccaccagctgtaggatggagcactttccccaccttgtcgcaactctccaagggacctccccttactgcttccattttacagctgaggcaacaggctccctgagactggcagcttgctgagggtcacagctggcgactagcttgcctgggatttgacctctgatctgtctgacccaaatgttgagttcttaaccacactgcactgcctcctgaggtataaatggcaccaaggacctctgctatccacagaatgttttgtgattgacaaggagttttgtattcacttatgtctattatcctgtttgctcctcacagcagcctcagggaggcagacagataggcttatgcccattttacagattgggaaatcagttcatcaaggtgtgatgactagtgtgatgcccacagctgtgagtggccaagttaggcgtgggatctcgtgcctgcacctctagatcctgctattgttctcggtttgcttggatctgtgattgctgtggttagcaagggtctagcgcactttatcttctgctattctccctctgctatttaatttctttcccgcaatctatcccttaacttcccccagccccgcatctcccacctccatgtcactccatcccgtgcagctggcctccttgctcctcttgccttgcctggcgagggtgttctcacgtggtggccttgctctatgcagatgtcagtgcatcagcaagggcctccctgactacgctgtgtaaaagaacagcccctggcactctctgtttatctttactcaatgctttgttgttgttattgttgttgttttgagacagggtttcactcctgtttcccaggctggagtgcaatggtgtgatctcagctcactgcaacctctgccttccgggctcaagctattctcctgcctcagcttcctgagtagctgggattttaaatcagccaccatgcctggccaatttttgtatttttagtagagatggggtttcaccatgttggccagcttagtcttgaactcctgagctcaagtgatctacccatcccggcctcccaaagtgctgggattacaggcgtgagccattgtgtccggccctcttcatttaatttatttctctttttatcacttatcaccacctggcctgttttgtatttactcgctctttaaaaatctgccctcccatcttgaacataaactccctgagggcagggatttcgtctcttttgtttatttcctgtaatccacctctcggcatatagctactggacattcaaaaaccagcccccgtgtgtaggaaggatatggcaagtcatggccatcccagagctgtgtccctggagttctccctactccaggttgagccccaggaaattttgtgggtgtaaatgctgctgctaggtccatgcgcacccgctgtgttcagctggcgtgaccttcttccctcccacttcgccccctcccattgatgctttataaatgtattagtggctgcatgatgtcaccgtaatgcattttgggaatagccatgtggtttatacacacttgagttgctttgaatgcaaacctgacatcatactgaaggcagcagtgaacaacatatgcacagtaaacaggcagagactgtcttattgattaacagatgaggcctctattatcgatcaaagcttggcgaggaaatttatcacttttaatttcagggctgccaaatatttctgcctctgagccagccattacagagaccatttaaaggcacaagcctcctcaggagagaggattttgtctgtctcgcttggctccgctcacgtgtccatggaactgcctgtctttgctctcaccctggagagctgggggggaagtcagagcctgtccgggtgggcgtgggagtactggggcttcgtgagtgggggctagcaatgggagctgacgtttgtgttatccacgtgtaaggagggacctggcccagagtcactgaggacaggggctttcacatgctcagctcagtgtcgtgacttcagcgaggtgggggtggagtggcgggactttgaaggcaagcagatgtggtcaggcttgggccgaggcagccgcctttactgatcatgtgtgcttatctgtcttcatcttcctctgcacttgtctgatggtacacatccggccctttatttcctacctggcctccttcctttctctctgcttctcagtcattaaagcgagaagctcctctagcccacagtgatggctgttttctaagaaccctccgcgccacatcccttggaagcctgtggcatggtgggcttctcgccgattggagtgccctccccttcccagctggtgcttccctcctcgggcctttgcttcccctttctcctttagggagctgtgagagcggatagaacccaaggaagaaatacaattaaaatcagattccttacagatccacagaaaatcattgatggctgatgatttgggactgggggcagtttctaattgtgagggagctgtgacttcatccagccccagctttcccatccaggcccactctgctcttggaggtgctttctgcatttccagtgtaaatggatgaaaggtagtcttggctgctacccctgtgaacacatgtcatgactgctttgctgtcactgggggctagaagttttcttggctctttcttcaaagctctcttaagccgtgtaccaggtgcttggcctgaggatgccctgtggcgtgaagggacacccagaggtcaccatgggattctccctgcctccaggtgaaattcaaccccagccacctaaggcaaatgacaatatttatttttaaagctcttcagtaaaagtgagttcatatcttccatggggtactttatcacccacttatccagccagtcgactcacatttattgagcacctactagagtatatcctgctcatcagtagaagataggtgtcagtgagatagagaaagtcgatacccccagaggaccccacattctagacctcctctagggtcctcatattcttcactgcaagaagcattcattggtattgaagtctgtgctggaacagcttgtatttggagttacattccttcagtatgtgctgattctccaaggcagaggttttcaaatttctagaaaagtagtggagtcatttttccaaccccaaagctctgatgtgtaaaataggtaaattgaattttcattcagagatgggagctcagaccccacccatggagtcttatccacaaaacatctttgcagatggaaccccagggaggccgaagggtacggggattactctgaaatcaggctctgaaatcaggctgcctgtgtttgaattcacctttactatgtcaaccactgtgtggcattgggcaaagtgcttaacctctctgagcttgaatttactcatctgctacctggaggtaatgctagcatgtactataaatggtggttgttgggacaaaccatacatactaagcatttagtgtcatgcctggcatatagtcaagcctcaggaaatctgaggtgatttgaaacagcactgtgggctacaaatttgtgtaacaagtagttctggctcgtacgaggctccaatacaaaactaaaacacaggcatatttaaagaagagctaagatgaccagacacagtggctcacacctggaatcccccagcactttgggagaccaaggtgggaggatcgcttgagcccaggagctcaagaccaacctgggaaacacagtgagacctcatctctttaaaataaataaataaataaaataaaataaaataaacaaaaaaacagaattagtcaggcatggtggcgtgcacctgttgtcccagctactcaggaggctgaggtgggaggatcgcttgaaactaggaggttgaggctgccattaagctatgactgcaccactgtactccagccttggtgacagacagagaccctatctcaaaaacaatgacaacaacaacaaagcgctaagacgtgttgaaaggaacagagtgcagtggcagattggaaaggacagaagagtaacggacttgagtgcttgatgtccacaaactgtggccttgaaaatgaagtgggattcgaacagatggaagaatgggactgagcattgctcaggcacagagactctgggaaggtaagtggtgcccagagagggccggtgaggacagcttacctatggaggtgggtggctaactgggacaggttatggaaggccttgaagccaagtagaggaatttagaatcagtacacattgggaggcgttgtatcttcttgagtaagaacgtgtgaggaatcaggtggctgtagaggaacctgcatctgttgagtagattgcgggtggctggtggtgtggaaaccaccttgcgtcttacagtgttctgagtgtgacgcagcaagggcctgaatggggtggtgattgcagtggaatcactgcacccaacgcagtggaagaatgcatctaccagacatcttgaaggaaaaatgccaagacttgtgacagctgacccctggatcagataatatagtagagccatgaagactattagccagtgataaaaagtactgtttcatcttgacatggtggcattatcactttaagccttctaaataacagttctgagaaagtttattaaattgagttgcactgaattaattttatttattccacaaatatgtatagtaataggtttccagtgtgtgtcaggcagatgcagctgtgcacaagatgacacagtccctcctccagggagcttacggtgtggtgagagagaaagacagggccataggcatttaaaatggagcacataaagggctcgagagctggaacatatcaggtgctatgggagcataaaggagcattgcctcacctacagttgggggcccgggtattgaagttgatgtatgaatgacgaacaggagctccaactgcaccatagcagccagagaagcatgggagaatgtcagaggcagaggacatgcagaagaatatgcacaggcctagcaatgaggaagaacatgggtcctccaggcagcccgcgtggttcagtgtagctggagaaaagagagcaagagtgaggtgtgagagacgaagcaggaaagaggagcacacccagaaatgctttgtgagtcacagtaaggagtttggaccttgttctccaggcacaggggagccattcaggggttttaaatggtcagatgcaggtggcagttgggggacagacgatgagtttagttttggacacactgagtcagaggtccccatggacatccaggttgaggtatgtcagcaattcttacattcccataaagtacagtttaggcaacagggcacatttccctgtgttggtatcatttttctcctgtctccccatcacctggagctaggtcttcagatcctccttcttcttgaggtatctaacttggaacccatttctgtttatcttggttgttctgattttgtttctccttctctctagaagagccctagacaagggcattcagaattcagttgggtgaatgctcacctcttggaggagggtctgagccatggatgatccctcactcaggatttttgcgggtgtccagtccccttccctagtgtctacctgcacagttgtggcccaggacctccccgctcaccagtggactattgctctagtggtaactgcctctcctttctttcagcgggtgccaaagcctttgtctgtgatcagtgcggtgcacagttttcgaaggaggatgccctggagacacacaggcagacccatactggtgagttgacttggattcctgttctccaggttttccacagtgttggtagcacatggacatgaactgtctgggtggcaacctctttttagcaaatgtgacatccagtaatttcctgggcgagctgtgagtaggatgggcttctgccacgttcagctactcttgtctgtgtggctggcccagcaggagtttacaagtatgacatggccccatgagaatggctgtcctagattaggccaagatctgtctctaaccagccactgagagctcatgttcttggaggtatctagtatgctcttgttgaggccttagtctgtgttgttatcaaaacatcttcttcccttggtcaggaaatctctcacacccatctgatgaaactgaaaccctcgtgtggccacagttggctggtcttccctctgcgagagctgagacattgtctaaaatcagcgtgtacgcaggatgcatttgaacaatattaactcacgatgatagagctttatttgatttcaaagggattgatttcaccgcaccaaagtcatctgatcattgtgatcagagtcgttgtcatcacatcatcacagcagctcacacttaacactcacagtgaggcaggcactgttctcagtgctttatgtcaggggtccccaaccctgggatcatggactggtgtctgtggtggtctgttaggaaccaggctgcatggcaagaggcaagcggtgggcaggcaagtgaaacttcatctgtatttactgctgttcctcattgcttgtattaccacctgagctcctcctcatgtcagagcagcagcagcagcagcagcattagattctcataggagcacaaatcctattgtgaactgtgtatgcaagggatcaaggttgcatgctccttatgagaatctaatgcctgatgatctgtcactgtctcttgtcacccccagatgggaccatctagttgcaggaaaacaagctcagggctcccactaattctacattatgtgagttgtataattagttcattatatattataatgtaataatagaaataaagtacacaataaatgtaatgtgcttaaatcatcccaggaccaccctcctgtactccgctgtatgtgaaaaggttgtcttccataaaactggtccctggtgcctaaaaggttggggaccactgctttacgtgatcccatctggccaatctctcagtagccctgtaaggtaaggttggaagctactcttatgtcatagatgaggaaactgaggctgaaaggagggaaagtgacttgctggagttggtagtggggacaggcgtggtagagtcttatagttcagagctgagactgcatgggtttaatcctgactctgccacttcctatttgtggggccatggataaattatttaaactctcttaatttagatttctcatctgttagaaaagtggagtaatattagtgtctacctcatagcattagggttgttgtggggatgaaataaggtattttatttgaagtatttcatggagtgtttggctcatagtaagcactcaataaatagtagtaggtatatttaatgtaatagatatttattgagtttctacaaggtgctggcactgtttaggcatttaagatgtagtaatgcatgagacagacgacattgctgcctctcatggaactgagcttctagctgggagacagaatcagcaaataaatatacgatatcatgtctgcttatgcatattaagtgctactggaaaaggataaggagtagagaataatagggagaaaagaaatattgtggatatttagggagaaatgttgtggataaaatggttagggaaggcctctccaagaaggtggtatctgggcagagtcttaaaaagtgaaggagtgagccactcaaaaatttctgggaagaatgtctaagcaaagggagtgagcatttgcagaagccctgaggctggatcaagcctgacaagtttaaggacccacacgcagagcagtggtggccagagagctgggagtgacgtgtagagagtggtgagggatgaggacaggatctgtcaagtctctcagccctggtaaaagatttgggttttactctgcatgtgctgagtcctttggagggtgacaaaatatttgcaaatcatatatttgatgaggaacttatagctagaaatagaaagaggtcttataattcaaaaaacataaacaaataatcaaattaaataatgggcaaaggttctgaacagacatgtctccaaagatagacaaatagccaatgagcacatgaaaaagatgctcaactgcattcaccatcagagagatgcaaatcaaaaccacagtgagatactgcttcacacccactacaatgtggctacaataaaaaatacagatagttacaagtgttatcaaagatgtggaaaaaccagaactctcatgggagtgtaaaatggtgtagccactttggaaaacattctggcaattcctcaagaggttagctgaggcaggcagatcacgaggtcaggagatcgagaccatcctggccaacatggtgaaaccccgtctctactaaaaaaatacaaaaattagctgggcgtggtggcatgtgcttgtaatctcagctacttgggaggctgaggcaggagaatcacttgaaccagggagtcggaagttgcagtgagctgagattgagccactgcactccagcctggcgtcagagtgagactccgtctcaaaaaaaaaaaaaaaggttaaacacagaattgtcatacgatgcagcagttcttcttttaggtatacagccaagagaagtgagaatatatgttcacacaagaacctgtacgtgaatgtttatagcagcattattcataatagccaaaaaatggaaacaacccaatgtctatcaactggtgaatggataaacaaagtgtggtatattcataccatggtatactatttggccttaaaaaggaatgaagtactgatacatactacaacacagatgaacttgaacatgctccatgaaagaagccagatgcaaaatgattctgttcatgtaaaatatctagaataggcaaatctatagagacagaaagtaaattagtaggtgccaggggctggggaagttgcgaggaaattgagagcgactgccgatggagctggagtttcttcatggagtgatgaaaatgttctaaaattgattgtggtgatgactgcacaccttcgaatactgaggctcctcgacttacaatgggactgtgtcctgataaacccatcataagtagaaaagataataaactgaaaatgcatttaatccaactgacctactgaacatcatagcttagcctagcctaccttaaatgtgctcagaacacttacattagccaacagtcgggtaaaatcatctaatataaaacctattttataataaaattgttgaagatctcatggaatttattatatcctgtacattacttcaaaactgtgatggtttcccacaattataaacttgaaaaatcctaagtcggggaccattctgtgtattagttgaactgtacactttaaaagacatgaattttatattaaatggtatgtgtattaggtctctgaaaagcggcatgggtgtgtacatgtatataaatgagctctgccagtgtcaggaagagtcactggcatcactcatgccacctctctctcatatatacacacacacacacacacacacacacacacatatatacacacatgtgtatacatacacacacaaacagagtgacgtgccatgtattaagccgttcttgcattgctgtaaagaaatgcatgagactgggtaatttacaaagaggtttaattggctcacagttctgcaggctttccaggaagcatgatgctggcatctgctcaggctctggggaggcctcaggaagcttacaatcatggtggaaggcaaagggggtgcaggcatgtcaagtggccagagcaggagctagagagagagagttgggtgagggagaagcagctgcacacttttaaatgaccagttatctaagagaactcactcattgtcatgagaatagcaccaagaggttggtgctaaaccattcaggagaaatccacccccatgatccaatcacctccctccaggccccacctccagcattggggattacagttcaacatgagatttggacaggacaaatatccaaactatattacaccatataataataacattttggtcaacaatggattgcatatatgacagtggtctcataagattataataccgtatttttactgtgccttttctacatttagatgtgtttagatatgtaaatacttaccactgtgttataattgcctgcagtgtttagtacagtagcatgctgtaaaggtttgaagtctaggaacaattagctgtcccatatagcctaggtgtgtagaaggccgtaccatctaggcttatgtaagtgtgctctaggatgtagcctagaagctacccactaggaagtggagagctggaacttgacccaactcacgtgctctttccacgactccccagctgcctgcacattgactgagtgttgtccatgggctaaaaggctcaggatcatttagctcactgccttgtcatgggcagagctcttttggcttgctgtgccctatttaagacaaaattgtctaatgaaacatttctcagaacatatccttatcactaagtgacatttgactatacacacatgcatgcacgcacatatacacacacacgcatacgtagctttactgagatataatacgtatacacacacagatgtgcatttatagggaagggggaaaagtagtccattggagggttttgactgggagaatgacatgacttgatttatgtgtttaaaagattattctggctcttgtgttgaggactgaccatagagagtgttgtcatgtaacaaaccactccaatagtagcttaaaacaataaagtgttattgtctctgacagttctttggataactgggctcagctgggtggttttcacttggggtctcatgtggtttccatcaggtaatggctggagctggtgtcatctgaagactcgactgggctggatgtccaagatggctccttcactcaattatctgagtctcagtgttcctttgcatggcttctctcttcagcagagtaacctggacttgctgtgtgacagctcaggtttccaggagtcaggacacaggaactgccagccctcttaaaagctaggctggaagtacacagcattacttctaccatatttcatcaatcagatagtcataggtcagccccagattgaaggcggtggaaggctggactctccttctcagtagggaagtgacagaaacctatagggaaggaggaattgatggcagtcatctttggaaacaagctaccacaggggactaaagtggaagaaggaagaacaccagtcagctgctgttaagattattgtcatcagtatttcagcgttcttgtccttgccttttctgagtggaaaacatgcctcctgactggcatcttgagctttggtctggaggggccttgccctgtcatgatgggaggggagctttacaggtgatctgtcattccagtcagcatctccctagctcagttatagagaaagtgacctggctaggttattttgcccagggttccagaggtggttgtcatgaaagcaaggggagaaccgggtctcccagggtcccagccattttcttattgctagaccacgtgtaactgagaatcccactctgagagttctaatctgggggaatgagctgtgagccagctttgccaagcagcttaattctgtccatccagattaaatttgcagcagcagggagccagctgccctctcagccaggggcaggggagcaagctgagtccccgagggatgagcagctgtggaggctgttcctaggcggaccccagacatatggagcaccccctgtgtgcctggcacctgctggggatatgatggtgaccaactcaggcacatgccatgttcttgaaagaagctgaaggtctgaatgtggtggtctgggccttttgttttttccccagagatcttgtggatggggctcctcagctggaggagggagaggtcagctaccgagtgccccctgctgatgttgaggtaaaatgtggcttgctcaataggccacatgtggtgtgctcaataaagattgagtaaactgagctcttgaaaggatggggaatggagaaaatgaatccaaattaggggtgagagaccaaggtggatgctttgagaagggctccctgccagccttagtgtgagctgtgggcgagctcccccagcagggaagagccacttccttgtgtggggcaggtgtcgtgctcagtgccgaggggagatacgacagcagttttaccctcaggatagggctggcaaagaggggtcctgtgtgaccatggtgactctttccgacatgtggcagagctcattcatcactcatagcgctacttcctgctgaactcaggtggatttttagttcccctaataatcaatgagagaatacagtctgaaatctatttgccctctctgttccaggaaaggggtcccaggaggaagggagttgcctgatgacagggagcgctgaaaatgtcactaaagctattggagtgggaaaagccaggtgggagaccaggtaccgttgggaagccaacgggagagtaggtagggaagagctctgaaaaagagaaggaatggagaccctgggacagtaaaaatactgccagtgccacttgatatttttgctaccttagtttataaaacaatttccttgattacacccatttaacagatgagaccatggaggcctagacactacccactaggaagtagagaactggaacttgacccaactccaactcaagtgttctttctactactccctggctgcctccgcactgactgagtgttgtccaggagtctgtaggctgattggttccgggtgatcctgtttagaggtcattgagttcatggccctgcctgggaagagctcttttggaaccctgtgccccattgcactaagaagccgcaacaccctgatgtgtacatcctcctcctggagtaggatacagtttgcctgaatcagatcagtttcatatccaaggctgccatgtgggagttcatggagctcacgtgtggctttgcatagggcaggtggttatggtgtcgtacaggtattcttgaaactggaaaatgaatttaatggaaactatttccaattccagcctatccaagagaatggcatgttcacatctcacccttttgaccctatttgacctggatttctgtcctggtgtgtgtgacccctccttgccccctgccctcaagatcttgacgggctcaagctggtgttctaggaggccacgcttatggttgggctgggctcaggctttgttgtcacattcagttttctgttttggtacaacgaaggctttgaggagataaacagagatcattttacaccttttatattatgacaaatacatattgcaaaacactgctgcttccaaaatgtttgggttgcagagcagtgaggaattaacagctaggcagttcccgagatgcttgtacttcatttacacatcagaattttttttacactgttcagtaaaataaaagtgagaaaacacacatacgtgcatgtgcacacccccatgcacacccagtgcaccacctggcttctatatcaggaatgtcttaaattagtaagtagttctttaagtccagataaactgataaataccattaatggcttaatttattctctgggtttgaaatttgacacacggacactatcttggctcaggaaacacaagtggttttgtgccagaggttttaatgaccgatcagtaatataaattgctgcatcactgagcagaaatagcttctccatgtcatttgatctggaaacttctctggccaggcagcagttaataaatttaaaaataattaccctctttattcaaagtcaaactaattaggagtgggttttacaaatcataatgttgttcaagccactgtacatccccatttgggacttgaacaggcctgggggcaacagacaggatccggtggtgttaattagagggcagcgagataacttggctgctgagctccagggtaggaggccgggcagtcttcagcatgccctcgggagaaaatgggaggtctgagtgaagaggccatgagggtgacctgtaggaaccttcaactctttcagtccatctgtaggggacccagagcagccacctattggtaatgtgaacatgggggagttggggccagggctggtctgtgtgggcctggccagagagactgagggagtcagggagcaggaaagggggatgggcaaatgactgcctggggacaagagacctgcctgaaggcagggaagtggatgggatgatctctagaggacattacttcctaggaaagtttgagccctaacagagtggtgcaggtttgtcatgcagattgcagggaagaggaaccccatgaagcctaaagtcagagtgtcaagtgcagggtatttggtgcacagtgacccagaacttgggatctggtgtcagactatctagattccaattccagccccatcacagattggataatctcaatataggcctcgcatggagtaagtgctcaggaaatggaggtgccagtttctctcatcgcatcatcctggtcttcctcagaggcttctgagaacatggatttcccccactggataggttgacggggccaagtcagtgaggatggtgttggaggaataggaacagtatacacctgctttgcaaggccatggtgaggtcttccaggatccctgactatgtcctccggccaagaggacatttgcaatgtgcccactgagttaacagccactggggccctctcagtgcagttgaaagaagtgagggcagattgaagctccacactttgagcaatctcagggagcagatttggtagatcttaaggccctgaggtctggaatgcccaaagcttcccaaaggaaccattccctgttggtgtctaaacaggtgatgtgtaaacccaggccagacaggccgcaaaactggaatcgagactaagcaggtgtaccagcctccaggagcaccaggcctgtgcccttccacgtcttaagaggaggcttcagtgactggtgccctcaaaggctcaggaattttgggttcctggtagggtcctgaaccatgtctgctatcaccaggaacctgggtattccctatctcttgacttcttcaaatagaaccttccacctcatcctaccttttcgccagtaagaaaaaagaggcaaggtcattcctaggtttagaagttctgaggctgggaagcttaagggcaccctctgcaggcccagggtactaggttgaactagaccctagacttaccctggaggaattcagctctctcctccagccctcaacctgccctgcaaggtctgccaggttagtgactcaagtttgctgtgagagtagcctgtgtagctggcttatcctgtagttccttcatttcctcattctctgagtttttaagtacctactgtatgctaggtgctttgtggacttaatacataatagtgaacagaaattgggccctgccttcctgaaggttacggtgttatgaaggaaatgagcatgtaggttgaacttgccttaggtacagataattcaatagctgtactcttttggatacttttgagttattatttttattaagtcttcactatagtccaaaaatatagaccttttttcctccctaatctttgccagagaaaactgagtcccagaaaggttaaggaagaccaatctggggcaggacttgaatgtgtgccttgggcttctgtaccccagagcccacattttagcattgtcttccctccctgtgggggcctgggcatcagctctcatgtgcggatcaatggatcaaagcccctatttgaaaaagggggtcagttaagaacacacaatccaaactagaattagggcccacgagttcagcccaaggttctctccactgtgactacaaaataagtactttcttttactggcctagaaaaggttgcttagtttccacattactgcgtcacaggggaagccactcaaccagatgcaaatgttgagatgctggttctcatccactgtgttgtcggctgcaagagtcttgcagtccagaaacggcatacctctggcggctgagggtccatgctgtggactctgcccttcccttctagcagggagtgggcattggagggaaccccacccaaagggtcctcttcgtttcagtgtgaaggagtctaggaggcatatactctgtcttccccccactctctgtttctctctctttgtctctctctctctctttgcactgtgtggcctccccctttggaggtgcagaactgtctctccaaccttggtgttggctgcctgcttgcactggcccctctctcctgatatgttaataatatttggaggaagcttcagggacagtccctggctctgaacttcagagtagaaaatgaagtccttgtttggagaattttctgtagtgggtgatcatggtgggggcagggggtggggtgggagtagcaggcaagacagaggatttattttattttaattattatttttgagacagagtctcgctctgtcgcccaggctggagtgcagaaggcagaggatttaaaagggtgagcagcaacgctccttccctcaggatagctgctggccttgccccctcctgccctgagcttggcacgagggacagtgctgggcaccaaggagtcctgtaatgataggaaaactggcaactgttctagttcctgctctcaagaacagcctcccagtggctggtcccagaggagctgggagggggccagatgatgacaaataacttaatctacctaaactttacatgaaaaaaaaaaaatccaaacgaacctcaaacctctgtccaaggtggagggtatcggggaggacaggacagtgagtcatcagagggacaggcagactccatgtggtttgctgtgacctccccattgaaaacataatagcatttgacttttataaatatcagaggtgatttgtatagcatttcacattctgtgccaaggaatttaacatgagaaagctcaggctgaagaacggccgcggaacgtcataggcactttgggaggagggtcatgtgctgctgtttgtacagtcagtgccccagcatagatttactcttgacctaatttcatgctgttactataaaggcatgtttgatgcctaatatagagttttattttccaagcacagggctctcggctgtgctggagctgcttgctgtagagtagggaggaacaacccagccgtctcctgctggcccagaccagctattctttctctccattgttcaccctagtggctcccagggcccctctggccaccttctggaggggcccccgatactcttttttaaattaataaatttcatttttttaagagcagctttaggttatagcaaaatggaatggagagtatagagttcccactgtacccccgtcctcacacgcaagtgcacagcctcccccaccatcaacatcccacgccacatgggtggtacatttgttacaattggtgagtctacgctggcacatcattgtcacccagggcccacagttcacatgagggttcactcctggtggtgtacagtctgtggatttggacagacatgtaaggacacgcattcaccatttttgtatcatacagaatagccgcttcactgccctgaaagtcctttgtgctctgccctttcatcaccccagcacattttatatgaagcatcactgccctggacagtgatttgaggggatcagtggtgtttggctcttttgggattggagaaggagaatttaagcaaggcaggtttggattagaaagggctgaagctcatttcctccacagacatcttgagtgtttctcgatgccagacatggatgctgggtcctgggatagggattttggacatgtatgctgggacctgggaccgggatgccagacacggatgctgggccccgggacggggatgccggacatggatgccgggccccgggacggggatgacggacatggatgccgctgggcccagggacggggatgccggacatggatgccgctgggcccagggacggggatgccggacatggatgccgctgggccccgggatggggatgccggacatggatgccgctgggccccgggacggggctgctggacatggatgccgctgggccccgggacggggatgctggacatggatgctgggccccgggatggggatgccggccatggatgccgctgggcagtgggcaggacacagaccttgcccttccccggcctcccaccctagtggaaatgtgattgcagattaccattggggatgtggaggcagcatggtgtttggaagcaataatgaattaggagaaggagaactaggttcttatcctggctctgctatggacttgcttcatatgggacaaatggcttcgtttccttgcttctctcaaaggtagtgtgtaggaattgggcaagaaaagtgctgtttggggggttctgtggttccaaggacagcctaagattctgatcttgcattgatggtctgtatttttctcaaccttagtttttcacatttgtaaactacgattaataatcataatggttgctgtaagaactacataaaaccatacatgtggggccgggcacggtggctcacacctgtaatcccagcactttgggaggccgaggtgggcggatcatgaggtcaggagatcaagaccatcctggctaacatggtgaaaccctgtctctactaaaaatacaaaaaattagccgggcttggtggcgggcacctgtagtcccagctacttgggaggctgaggcaggagaatggtgtgaacccgggaggcggagcttgcagtgagaagagatcacgccactgcactccagcctgggggacagagcgagactccgtctcaaaaaaaaaaaaaagaaaaaaggaaaaaaaaatcatacatgtgaagccctgagccctgggaaggaggactgatgtatgcataagtggtagctgcttgctactgttatttttagaggcctgcagtttctgtccctcaccagtagacaagaattcctccactttatttagtagcttattcagtaacagtgtattaaatacctactgtgtctgaagaagggattaaagatgaagatcttttgcctcttaaaaactgttctagaaattggaggggaaggatagagtctgatctttgaggactattattcagaacgtggtctgtgcccagcactgtggctttttatgtatggtccaatatagtcatcaggacaccactaaggggggcttcactgtctgcatcactgatgaggaatcacaggcccagagaggcttaaataatatgactcatccagtggcaggactgggattccaggttggtgttttcttggggtgatctggcaggactcaccgtcctcactggtctgagttgccccttcactctcagaattgtccccacatccgagtcctgaataatcaacctcagttcttgatctcaggtttccactcgtctcccctcgtgcccatgctcagcccctcaagcttctcctttatccctctctctcccactgtccactcctgtgtttcctctctgacttctcacccttctccttagtgacgccatggctgcctgatgacagaaaggagttaataaaaaccaatgtgtaactgaaacttgaaaggccataaattgccttgttttttctaggatgttggtagcattttgatttaatagttggacaaacacaagggcctattttattcagagtttacaggcctcaaggctgttattcctccaaagttaatagcattgaaattgcagggtttgctataatttgcctatcgctttctgctccaccattgatgtttactgtcagcgggatggaatctcaatccgactcacttagataacatgtctgttaaacatttagataattgtaccatcattaacttgtcacattattttagagattcaaaacagaggcagggtaagtagaggtacccaaagggagtggaggtgggaggagggggaggaggaggaggaggaagagacaacctcttctgagttagacagccaggagaggagaaagttcattgcacaccttggcatctcattggaggtgtctaagttaaggaggtacgtgccaccaagccgggcccagggttgctccctgaggaatccggggaccagtgtctcaaccaccgaccgccgtggcagtagggcctgttatcagcaggcccctgagacagtgtggcaaatgctcagaaacccttggcgtttcatccccgactttggcctttatgtaccaaagtttctaagctttccttagggatgctgattgcaacactatttgtaattgcaaagcaatgagaatgacctaaatatccaaaagtaaggaatctgtcaatgatggtatggaaagatgtccatgatgttttgcatgataaaagctgattagagaaatcaggttatatagtgtggtcccatttcatataaaatactaaagccaccctataagactctgtaatgctctatacctgttaacaatgattatctttagaagtgggattatagggcaaaggtgttctactttctgctttatctatttttgagtaataataatgatgatttacaagcacatatcacttacataattttaaaaattaaagtcactttataaataagaaaaatatcaccttcaagtctcattctgtgtatggaaggaggacttctaaaaagaaaaggctgcaagtacaaataaatgagttttgggagcgctcatggacatcagtatctcagccacactggcaggtgcctcagtttcccactgttagaacagataaatgccagatggagaatgcagcacaggggaatgggcctgtgccagcactcagaggtcagggctgctgtcttgttcactatgggcctgacggaggaagtgagtaagaagagagctttttcttacaccgacataaggactgaggtcacacctggagggggtgacagaggccacaaataagaatgagctcagctggaagtgggagtgactccccatatgggagacttggggatcaattaaatatcaacagtagtggggcactgagcttggaatacaaaactgccctcgagaaataacggggtgtttgctccctgttcccatggtaccacgaggtcacagaggtgactacagtgctgtccatctggctttggacactgttatctcctgcattcccagggccttctgtgtgacctgggcgagagaactgtcactattgcctctctccaatctgtgtgtgccccagtgacacaggcaataggaaaaatgtttccccaactgtaccgtaaataatgcagatatttgggcgtgggagaaacaaataatatcaatattttatagactgtaggctaaataatgtatatatttagaaaagcggcttaaatatttcatatgctgcagtgaagattcctgcttagaggcataatttgggctggtgagggctgtgggttaaggatgcagtcctgcggagccccggggtgagggggcagaggggaatgcagtaaaagtgtgtgtgtgagattggagtgtggcaaggacaggcaggtatcacttatttggaacccaagtagttggaagtctcagattttttttaactgtcctgtgctctttttgtttttaatgtgggagagagacaaatgacaacctaataacaagaatttattttcaaaaagtaacttccaacccaagagaattgaaaatgtgtccacataaaaacttactcatgaacattcatagcagtgttgttcacaatagccaaaaggtggaaactacccaattgcctatcagctgatgcatggatatacaaaatgtggtatatccataccatggactataatttggccataaaaagagtaaaatattgatgcatgttacagcatggatgaactttggaaatcccgtgctaagtgaaacaagcaagacatgaaaggccatgaattagatgattccatttatgtgaaaatgttcagaacagagagctctagacagttagtagattagtggatgccacaggcttggggaaaatgagaagtgactactaatgggtatgtggttcctttttggagtgatgaagatattctggaattagatagtggtggtgatggtattcagctttatgaatacattaaaaaccaataaaagggccgggcacagtggctcatgctttgggaggttgaggcagaaggatcacttgagcccaggagcttgaggctgcagtgagctttgatggcaccactgtactccaggctgggtaacagagcaagaccctgcctgttaaaaacaacccccccgcccccctgcaaaaacaacaacaacaaaaacattaaaagggtggaattttatggtacatgaattatatttcaattaaaataaaaaacaacttccaggtatgttgttggttcttacagacttaacccaacctcctatacctgcggcatcacaggactgcaggtaacgctttgcatcatagtgaccattcagacagtgcaggagactgtggcacctttagaatcattctattcacagaaggcagcagggagtaggggtggctctgggatgcctccttgccctccccattcctccattttcagaaacaggaaggaaggatcaggtctgaactctgatctggtgaagtagtgagtccgacatctgcaaagtcaggaggagacggggtagttgcgtctgtgtagatttctagaagaaaagccagccatcatctggcctgggaggagtcactcttgtcaaaagcaagacacggatggtattgacccaggcaccccattttaagaaaaatcatacctgtaatacggcttcagtgtggggaaattagaaaatacttacaaacaaaagaaatatgttctctgtgtcccactatctttttttttttttttctgagacacagtcttgctttgttttctaggctggagtgccatggcacgatctcggctcactgccacctctaccttccgggttcaagcgattctcctgcctcagccttcacaggcatgcaccaccatgcccggctaatttttgtattttttagtagagatggggtttcaccatgttggccaggctggcctcaaactcctgacctcaggtgatccacccacctcaccctcttaaagtgctgggattacaggtgtgagccaccacacccggtctcatttttcttttattcacaaatggggctatgatattcagtgcatactgttttgtaatctgtgatttgcctaccaacagacctatgtcttgatgatcattttaatggtttcccagtgttctccctacacccattcgtttttttctccccatgatctctgatgttccttacttgtgcaccagggaccagaccctgtatccagaggaccttccaggggctccaggcaggagaagtggctaacagagatgcagctcattaccacctctcacctattgctgcttctgtcaacaagataaactgggcccgccaagcagttttgcagtagctgtttactcgaccatcccaggcaagcttgagatgctgggaacatatccagtccccacattcagtcttcttagaaactgtttcccttttggttttctctaggcttgcaagtggtcactcgccctgagctggatttgggcaggtaatttacttccgctactaatttaacgaatggcactgccctgaggtcgggcagactgaggaaaatataggcatcaattcatttgccacgttaaaacccagagttaagtaacaagttaagcatctccatacattaagtatcccaggcccaactagggaagatttcctggagctgatgagccccaaccaggcattaggaaaaaggcatttgaaaaaaaaatttcggccgggcgcggtggcttatgcctgtaatcccagcactttgggaggccgaggtgggcggatcacgaggtcaggagatcgagaccatcctggctaacgtggtgaaaccccgtctctactaaaaatacaaaaaaattagccgggcgtagtggtgggcgcctgtagtcccagctactcaggaggctgaggcaggagaatgacgtgaacccgggaggtggagcttgcagtgagccgagatcgcgccactgcactccagcctgggtgacagagtgagactccgtctcaaaaaaaaaaaaaaaaatttcttctctgaaccttaggagaagttagctaacagagagattgtaggtttgggtcagacgcaatgttccctgcccccagtaggagaagatccattacagattggaaatgactttgtctcttaagtgtgcattgtcagatgggacgcacgttcccctcaaccaaacaaatataaaatgcttccagcctctgcctcggattttctattactgtttcacaggactccagagagttttaagatagcaatttgattaagcttatggggaagatcccatcagataacattctttttctgcaggtagagataatgtgttcaagtattaagtatgttttaaaggtaattatcttttccatattcattttagttacaggaattgacaagggggagactctgcatctagggcccttgggccctagagtcactctgactgctctcctctggggaacacacttgaggcttttgacaaatgaatgagcaccaagggtttttctattttgaaatggctcgggatcccctgtctccagacaagtggtctagagggcaaggtcttggccactgacctcatctggctccctagcttagattccttgttctgggacacccactgggccccaaatcttaagctcctggatgtcaagagggagcctggctgctactcagaaagaggacttgtctcatctagtaccaagtcatggtgccatatcgccaacctttcaaaagtagagtctggaattgccatttacatatactgagcccagtgttggggtgttttcacatcgggagacactaattaggggtcctagaattctaaaatctgtagactcctagactgcagaactgttgcaaggggctttagggagcatgatgctgagcttcagaggggttctgggatttgtctgggatcacacagcaggctagagagacacactgtgggctagaacccaggaatccctggtcttagaccactgcttctgtccctctacccacaactctgtgccatctccagaaaagctcctccttccctttcctggaaatccccagagtaggagattctgcccccaggcagccctccttggccgtctgtgagtcagggtctgcaccagggctctgtatgggcctgaggagcccccatagcaagcctgatgctgatggcctggagttcctcaaacctcactttgcctgctagctgtgccgttctaagcattctgtacatttttacaaaatagaaaaattagggctcagcccgctttcagaaagctaactattgctagggaggaaaacatacatatctaaaaagataagtaataaaacaaggcaattggatgtgatatacctgcactaagaattgaggagtgatgtttttaggttccccatccctttgtctgcccaaaatccagtctgctgtggctagacacctatggcttctgcacacagcatttcccccatgttacttctctgtctgatctctcaggtgcccttggtttgacagctgcagcttgttggtctgaaggcaagtgacactgggaaaggaccctagtgagaggtttatcacataagaccccaggatggcggcatgctctgtttttgaacgactgcctcattcctgtaagacaaaggtggcaatggagggtggatgcagagttgatggctgcagcccaggttttggtgcttggcctcatgtgttacatcctaggtaaggatgtctctgccatcttaacacccatacctgctcttgcgtctctctctcttatccttcaaagcatcatcattgtcttaccccagctatacagtgaaatcatttagaggaactttatgaaaaaaatgtattaatagcaagcaaaggttcccacctcaacccggatgagtcagaacctcctgcatggggctcagacatggatgtattttcaagctccccaggagattcctatggataaccagggttttgaatttccagatgggataagattagactctgctgcatggcccagaaggttcctcacaatcagagtcacaggcctcatcttttgtcaccccctatgatgcgtgtacactgagccacttagaatttcccagactctcctggctgtttttctcctccatgcatcttccactaacccccacactctcatgtgtcttgtttgcctgatacacacacacaagacacacacacacacacacacacacacacacacacatattgaggcagagtttcactttgtcacccaggctgtagtgcagtggcaagatctcagctcactgcaacctccgcctcctgggttcaagcgattctcctgcctcggcctcctgagtagctgggattacaggcatgcgacaccacacccagataatttttgtatttttagtagagacagggtttcactatgttgaccaggctggtctcgaactcctgacctcaagtgatcctcctgccttggcctcccaaagtgctgggattacaggcgtgtgccaccatgcccagctaatttttgtatttttattagagatggagtttcactctgttggcccggcttgtcccgaactcctgacctcaggtgatccgcccacttcggcctcccaaagtgttgggattacgggtgtgaaccaccacgcctggccttgcctgcctggtattaatagagtcttctcagctcatttgtcttctctatgacacccttttcacagttgaccctccttctggtctccagcaccatagatgtacaccacttgcccttagctatcttgccactgcacgagttagggtgaagattgaaccaccttggggacttgggcctttctactgtgttagttcaaataatcattcaataaatgcttattgcatgattaatcaaaaacagaaaagggagcttcctgattagaagcaggaatgaagaatctgttcttgtctggcttcagatttttgctcttcacttgccaggtgaaggaccttggaagagtcactcatcctttgcaagtctcagattccttgtctgaaaaattaggacaccatacctgccctttatacctcaaaaagggatgtgaggaccaaaatggtgttagaacagggtagggtctttgcaagcagtaaagcatgattcagatgtaaggtgatgtcattgtgatgtttcctcttgctgtggtttcctgtcatgggctctggcttcagggtgccctgcaatgccaatgcaccccagtctgtgccctctgcacagcctcccatcccagcttttctgggcccttttcttccgttggcttcttttatcttgcacctaccttgctttctccctgcacgtaccaccaccacaaatgctgtacaagagcaagttaaccactattgttttgaatgatagagaaaataatgagggaaacagactggtccattcagtgattaagtattcagtaattaagtattcagtgttaggtggtgggcagaagttaggaagaaaggtatcttaaggtttttgattcggcgtcatccgaatgggtcaatgagacagattccacaggcaaaccattccagatccataacctctagagtagaaagtttcagaaggaagagatcccccaaactgtgtaattcccttgtaaatctcattcattcaatgggatttgagaaccaaccacttgtgcaggtgcccgcatccgaagataacttgcccccaggagacagcagataagaagagggcagagacaaaggaggtctttttgtgacttgcatcatggatgcagaaaaggtggataacccaactctggtggggtgagtgggcagggaaggtttggaagcaggaggaggagacactcaaagctgctttggggtgcacttattttgtgtgctggagaaggatttgctggccatttcttgtgaaataaacttttttgtgtatgcatgtgtatgtaggctgttactaatcccgttcctttcttgatctactgtttttcaggttaatggtgtctgggatttgtggagggaggaaggatataaaagggcaaaaacaggagaccccggtgcctggattcagagccttcacattccggagatccccagaggcccctctccccagacccttcagctccagaaagccattgtgctccctcctggcctctgaccctgaggctctgggaagcagcaggttgttgacacttggacaatcatttcttgcaaggcaactgcctccctggggggctctcctctgccttagggtggtgactattcccccaaccagggttaaggaagagaaaaattaactgttggtcagagcaggaggcaaggatagagaatcctcaatttcaggcccccaggcatgttcacccctctctcacttgccacttcaggagtacaccacagcccagggataagctttaggaaaatgggttcgagagaggcatttctgatcagagttccttctggcatcctgctgtgggtctcatgtttgttgaggggaccccatatttcttcatgaaggatatctgtatgtctgctacagtctcaggaatgcagccacaggaacaaagaaatttctagccctggtgctgctacttattaggagcaagacttcagacaagttgcttttcctttcagaagcttggtttcctcattggtagaagagggtcaaaaagtcacttgcccggtgagcctgctgagaagagcagatgaaggaggtgtactctgcactctgtgaaacattgcaaatgtgcgggttgatcattaatgttttctcttacagccaaagctagtgtgtgtgtgtgtgtgtgtgtgtgtgtgtgcgcgcgcgcgcgtgcacagtttgtgagtgtcgggttcccaagcatttactctcctctctcctttctaggacatttcaggaagcattattcaaaagccggtggggtgggacagagggactattaaaatttttaagaatcaccttgcatttctttcactttggtcttaataataaataactctaaccctgcagccaggagctgggatgttctgtccaaattagcacaaatctctgtctgcaacagccgagcatccccgttcagtgggcgggatcagtaccatttccccagcaatgagaaaaagccctcttgctaagctacagaaaaatctcccttgtgctttaattttggaagaagcggattagtgtggccatatttaacctttgaccctgaaacaaaagcattatcaaaattatttaccaagagcgtctgtcttcttctcctcacccccacttccctgtttgccggggctagtttagaatcttggtaaacttcttcagagcaagagcaaaattttggaaggccatcattaccttagagacatcccaggcctggtgttcactgccagggctcttggggtctaaggtgggttaaaggacagagatgagaatcttataccacagtggggttcaaaatttgtgagttggatgtaaaaactctttctcctctgaaactagcctagtttctggctgtcttggagatttaactattcagatgatatgttgattttttttttgttttgttttaaagatggagtctcactctgtcgccaggctggagtgcagtgtcttgatctcggctcactgcaacctccgcctcctgggttcaagcgattctcctgcctcagcctcccgagtagctgggattattacaggtgtgcaccaccacccctagctaatttttctatttttagtagagacagtggtttcaccattttggccaggctggtctcaaactcctgacctcagttcatccaccctccttggcctcccagagtgctgggattacaggcatgagccaagtgagtgacctaaaggtgcagattgatttctaccttcttctccttccaggcagaaatccatagacttggtggtgtggggtggaggtatatctagacctgagccatttctgtgggtttaaatctcatcttccctgtcattaactgtcactgtggccttggacaaattatttgaactctgagccccccacctaccttccttatctgtaaaatgggcatagcaataatagtgcccgcctcctagagttatttttgaggatagataacaggatacacatgaagtgcttactgtggggtttggtgcttactaagtgttgagccagtactaactactgttaccacagttgttaccattgtcatcagtatcatccttattgattcttcgtcacttccccaggtcctggttggctcccttccccctcccccgcattggggtgttattggcgacccgccccatttcctgcttgtcctctgccctcaccttctttgcagtgattttcagagtccccgtttgcgttcgcagtggggagtttgacttcatttcataccaggaaggccagcttgcagtgggggattgggagggcagagcgctttataagctcgcgatgaaagctgtaaaacgagatggtcaaggatctggccaggcctggttcgggattatggccggcccctggaatgctgaggggggcctcttttaagaagccagtgtctatttacagtgtatctctcataaaccccaacgctggggcgagggcagggggactcgccctcctggcatgtgattgattatctggtatttatgccattgaggacttgtcagcggtctggggtcaaagggtcatctcatgtgtcttgccgccagcccacctccttttgtacagtgtggaccgggcgagctgtgcacaaaacagctttttcttttccttgggaaaggggggatggggaggggggagtgtcaatgaaatttttttttcagccttttctgaatagtgttctttaaattctaaagaacttttaattaaaagtagcaggaaaattcatcttgagaaggtttaacttaccttaacagatacttttgtgtcccaagaagctgggagtgactttgaaagaaagaaagaaagaaagtaaggggctttgttgtgcctctccccctcccccaggcattttcaaagtttcctggagttcttgtccactcctgtctggtgtggaccctgcttgggaaagcaggaagggaagaggtcattcttctcctttaacatagccacacaaatttagaaagggacttggggattctctgctccaattttctcctgttatagatgaagaaactgagccttgacaggtgaaaagacttcgctatagagtcacacagctacacagttgcggagtcaggcactgggctctgattctctgtatttcctagtgctcctttgagcatgccaggttgcttcccgaagctgctttggatgccaagtgaagataaatgtaatgatacctttgctgtcgttcagtcctggatgtttgagacttgggaaccactcttaaattccttgggctggaagcatccctgagggaccacctggcttatccccccatcccccatcgcctgcctcagagcaggcagtccgtgctcacgtgtgccggaggaattgctgtgggtcccttttctaaaaatctgcagaggaagtctctatgttttctgcttggtagaaaatgccggcacccctccctcaaccttcatcactggatggtctggacatccttctgaacagctgactttgtttcttccttctgtggctcaggagtggcccacccatggaagcttgtctgtctgttcccccatccccccgaccccctgtgtgcccacagggggccatccagagctgtgactggccaggacacctcagtccactgtgctgctccaccatggcctggctgctgtagggaaacattgtccctcttaactctcacccaggcttttggtgacgtgaggccttgatgaaatgctttgtccatcgcttccaactcattgaaccaaggtggacactgggcagagaaatcatttgccaagagataggtatttgtaggactcgcataaattcacgtgtcctgtatcctgttgtttgtcttctccatcccaccacctcctcatttaaaaaatgcaatacaaagaattgtcttctaaagaatagctttagaaatcctcattcctttccattccctccattcccattcacattaaattagcgaatgctaatttggactgatagggcaccactgtgaaaaaggtgtgaagaaagatctgcttcttgctcatgggaggagaccccagcagtaattagattctcactgaagtcactgggtgccacaaactgtgccagtgcttacctcagactgtgttatttggtcctcatattaactttccaagatgaacattcctgtgtccagatgaggaacatcagggctagacataggtagccttctctggggtataatttgctttaagctaagtagtattaaacatgttaaacacgtcatctctttgaatccacataaaatccctaaatccctgtgagacagggattgttgttatcctggttttagatgaaacaggcacagaggagttaagtaacttacctgaggtcacacagcagtagtaagtggtgaagtggggtttgatccaccatgaatgactgcagagttcacacttgaactacttgctgctccacctcttttaagttgtagagcttcctgatgctggcgctcatgttttgttttgtcttttcctactattctgacataaatctgctggggagacactatatatagacatatataaatcagccagagaccagcaaaaggtcactgtgtaatcagatgccagcctgggtggtgcgtggagaggaatttagagaaggaatatgttaacaaggacacagtatttagtctcatgtctggacccccatagtaaggggacagtgccttactcatctttccatctctgggacctaactcagggcctggtacacattatatgttcaataagtactgattagattactgggaaagagttagtaggggagatgggacttgaagttttttgaaaatgatattaataactgtgacagttatttgtgaagttttttgaaaatgatattaataactgtgatagttatttgtgaagttttttgaaaatgatattaatggcattaccttttatggcatactggccaggtactcagctaagtttattatttagttgtattaactctcacagcagccctatggctattatgatccctggagtaaacttaggctgaagagagattctatatcttgctggaggatttaaagtctcagggtggttggtgttatttgggggcttttttttggcttttttgttgttgttgttttgagacagggtcttgctctgtcgcccatcctggagtgcagtggcgcaattttggctcactgcaatctccgcctcccgggttcaagcgattctcatactttagcctcgtgagtagctgggactacaggcatgcgccaccacatccggctaatttttatatttttagtagagacggagtttcgccatgttggccagcctgtggtggtttgtttgtttgtttgttttttcttgattttgaaattattttttttcctaaagcagagaagaaggcacaagtgaaggagaaaaggcagacgtgagtgatgatggcagaaagtctgctcaattggggtggagggatttggaagccagagagaggagcttatcttttttttttttttcctgcttataggtggaagttgcttctttaatataaagatttctggatctatgaggttaactgtgtccagttaattgaatttataattcagcaccaaaacgctgaaaagaattgtcttttatgtcccttaatgagtgctataaaaacaagtggtgaatctaattttacgaatgttcctttatgacttacctgataactagtagttgttcaacacaaaggacacataactcagtctggacctacactggctgcctgccgtaaaataacttgttttagaagttggccttcttgcttctcttgagtggcccagggattcacttgttcccttctctgctccctcttctcattgaggatcaggctcgggttcttcattctggaggattgagatgggttaccttccctgccagtccaggatgaccaagacctcacatctcattggctctttccaaaaaggggaagggaaagatatggcagctcattcagatgtctctctggtgcagcatattgcttctacctagaagttgcctggtgtgctagcaagaaaagagaaattaagagaaagactccttttgtctttaccctacaacgagaggtaaagagctttacagccgcagcagccgcattaggttagacattggtgagaacttcctgagttgcaaagatgttcctaagagagactgataactgtccatctctagagctgcttcagttgtgagtgggcacatatatagatgcccttatctttttatagcttttgtctttttttatgttttgaaagtttaatttgaattattttgtgattacagatcttacaggtagatgttgggtacaaaattcaggcattctctgatggctatttgagaaaggttggctgttcccatctgcaatagtcaggggcaggagcctggactcacaggccagtacagcactcagggagacagcctagaaatggaagggcttttggaggagggaagctcttgaacagagcagacagggtaggggtgtgggagcgttgatgaaggaaggccaagataaggctgtggtttccatttgttaccacctctcccgcttatcttgagtgagaacaggccctacagctctgagcgaacctttccatggggctgttgagctgtgaagaggacatatacgagctctcctatcctctcttcccagtgcaccctttcccttgcacacacaggcacctgtaaaggctgcagctttggtctattggatgggtggggacaaatgcagaagtgtccctgttctgggtgctgattacttcctagcagagctggggggtggactggcacatttgtccttcatgatctgagtcttacctctgctggccttgtgctcagactggctggtgggccatcttctgccttgtcccacccttactagattgataaattgctgttccagtcaacagggctctgacccagcccttatctttggtcagaaggaggctgggtgacaaggacagggggaggggctgctgcacaagcccagcctttggacactggtaaccttttgtgggggaatgtacacccagctgctttggggcccagaggaacattctggcaagacagtgctatcagcctaaactcatcacaccggaggcagcctgcagcacatacacatttctcttgacttacaggagactggagatggagggaaataagaagtcacctccccttaccccctattctcactgagttggcatgacactaaaagatcccctattccctatcattttcagaagaaccaagacggcttgccactcattcattcaacatttattgcatatctactatgtgcttaaatgctgggaatagaaagatgactagacccagtctgttgattcaaggaattcagagttgagaggaagacagacacataaacaggcaattataatgcagaatgctgagtgcagcgatagagatatttatacacaggatactgtggtagcccagaggaagggtgctcagcagatacccaggggacagataaggcttctagaaaggaagacaccacaaggttttcaagaagtagaaagtagccaggatgaagggagagaaggacagaagaaatggaactgtatgtgtttagaaacagtgacactgtggcctgagtagctcagctgagatagaacgtggtggatacagttggaggcataggcaagcccaggccacagaaacttgttaggctgtgtttaggagcctagattttatccacagatgacaaggagttcttggaagcctttaaaaaggaagttatgagatcagatacattttggataggtcgcactggtggtgctgtgcaggtgagatcagagggaggtaagctgtgtttaggagacttttgtggctatcctgatgagggatgcttacatgatagaaaatgagctggattggggtatctcaatcctaatgtcaggcaagaggacctagaggccttcggggtgacgtccaggcatctagctcgagtgaccaagaggatgttagtgctgacagctgagatggagatccaggccaagcaggtttgagaggcgaagatgtgggtttcaggtttggatattcaggttgaatataagatgtctgcggaacatctagggagcagctaggtgtatggattttgtgcccagaagagaagtccaggctggaggcctcctggcttcctggtggtcactgagaccgtgagagtagagttcacctggacagatggcggggcatgaagcgtcatgagttaagggcagaacaccatggtggggatgagagttggggcaaagggcactgctcagcagagaagggcctcctgcagccagctccttaggctccctggaaggtgaggaaggcaggaagcatgggacctcaggtgcagagggcttctcagaggcggattctcaaggtatggcctggtgtggggatccctgcagatagatgggtctctccagggtgaggagcgctctcctggcccagctcctggcattctcaaatcccagggatctcttgtgaacagggccctggccctggggtaggagagaagaggctgacaggctgaagaataatctcagaactggtggggacttaggggattgccccttgcttccagggggattggatgggcagtcctccaggctgctgttggaaatttctcagagaaggacctgctgtgctgcacggaccttcctggaagtccaacccaggtgaacccttcttgctggttccattgctgcacgtaccatccctttgcacatgtgtctctcttttctgaggttcatcatgcttggttctgtcgcattgtctggagggaatacaagcaccctgattccttccaaagaagaggagctcagggccctgggtcctgccccactggggctttacatttcctgaaacccctcttccactttccctgtcccacactgatcctagaatgagcactccatttgggatgggtggccgctctccctctacaccctcctccagtggcttggcacttcgggaccagctgctggagtgattgacataaagccaatctataaataaagtctttttcttttctcataaagactttgtggttgagtttgccttcaaggtcaagatcagacctttctaaataaacacatatcaaaggatcattagcaaagcagcactgttaaattgagatattaacttctgtcaactgcttgtttcttttttgttctgtaactcatgactgcagtaggtttttattattttgtcctcaggcagtagcatctggcttctgtagagactgtaaaaattaaaaagcaacacaaatcattgcgagagaaaagcagtaaattcaatgataagaatttaaaattaaaatgtttcggtgcttttatattctgcaaaacatgaaatgagtgagtttgttgcctgttgccataaacctcacccagctaatcgtccgcttgagttttttcctgtctcttttgctcatcaccatcaattctgtcttggcacaaggcgtaaagtgagagccgtgtgtgtgtgtgtgcatgtgcgtgtgcacgcccatgtgctggcatgtgtatgcatgtacgtgcgtgtatatgtatagcggggctggggcagagtggtggatgcactcactgacctccacctcattagaatgggggagacaacagtagggaggcatcatgtgggaaccagggtagggaaggaagagttgaagattattacatccccatgggtcagagttcccttttttcatcaccctttctagttaaatacaaaaacaaaacaaaaagccccaaccaaccaaccaacaaacagaacactccaggtcacagacatgagcataaacagcaacctgtagcatccaagttaaaatgtaaaaaagaattccctgagcaagtgtgtgatgctggattaggggtctgagtgggtggctgggtctttcccattccagagatgcccagcctttggatggggtgctggggagtgggatgggaagcatcttaggctccttattccaatcagaagatttagggtttctgtgttgaggtcactcattcttactgcaaaatcgagttgtgtctctgggcctagctatgtcctgggctgtgagggagataaaagttgattggttttttttcttgctctggaggaactttaaaaaaagcttaaaaaaaaaaagtcttttaaacagtcagaggacaatttaagacaaatgtgagtaaggatgtgatggcattgtataagctgtttgcagacattctgggaagcgtgcagagtggtgtggggtgagttcaaggggagctattaggcctgagttgccttgaactaattctccagtctgttgggcttggggtctggaagccttggaaagcctggggtgaacactgtcagggtgagctcacccccatgtctaaaccaggccacaggactgggacagtgagggggaatgctgtgggtcccttttcacatagtctgtcccagtttgactgctggacccacaggcatgaggccagagctctttgtcccagacgaacttctccagcctagagagaggtgaggaaagagagccagtctttggcctccgtcaaagggaatgaaggaaagtgtgaagattagtggacggaggggtcgagttaagagggtatgactaataggctggtcattcagataggagagcacattgttctctgggcccagatggtccttggaataaatcagctcaggcagaagcagacttccagtacaaggaagtaggagcaactgcttgcctgctattctctaatgacatagcccaggcccctggccctgaatagcagccattcaggcctccactgtggtgttggagtgggggatgtgtgtgtgcaatgcatgcatgtgagtgtgtgagcaatgcatgcatgtgagtgtgtgtaaatatgtcatgttctagcctccgatgcttacagaagagtggatgagtgtttgtgttgtaaggagctggtacagggagatttttaccttggagcccttctcaactttaaattccaaccctgaaagccgtggaagtactggagtcatttgattaatgtctccttcagtagatgggaagctctaccagggcagggactgtgtcagtctgattcatcagtgtctccccagaccaggtgctggtggatgcttgatagacatagatggaagaaagttgtagcaacattcttatttttctccattgccttgcagtcacggcccccgttaattaagtagtatataagtaaatgaatgtatcagctactcctcccatgacttccctctagggacggtcatgaggacagagtgagctggggtagggatgcacaccacagcagttacatagagttttgggtggtgcaggtcctttatttctgtacttgggacactccacagataatgtggctttgaagcaggactttctgtcataaaagttttccaggtagacagcttccctagtttccctggttgaagacatgcaggcatgtgcaggtcgtagaatacgtgtaagcatcacggtgatccgtggtggtttttctggcatgatggccaacatttcagtggaagagcctacccactcccccctcatgccctacagtctccattcaaaggctgtgctagttccttttcccttcagaacccattcagcttcttaggaaggagggtagggaagagccaagcagcaatatcactgagtaaataggaataatcaaacagatactccctggagagagttttctttctatgaagatcttaattaatatgaacgctttgtcctggtgttctgaggcagactctctgtaccaaccgtgtgtgactgctgatccagctctgcctaaatcagatcactggggtctttcatcctttggggaataagctcctttggagaatcaagccagatcttgcctgttgggagattaaataagttgccctgtcttaaagtttaaaattaagtgcatattaagcaaatgacagtggaggccactgaagacaccttaggcctggaagcatttcagttagagaatgtttcagggactccacacacattcattccccttctccactccaccccactgtcatgccatcctgactttccactcactgtaaggtgcttcagaagacccaagactcaggctgccagagtggctgagttgggtgacttgggggttgtttctctcccattcatgtctgagatcatgaatggtcctctgggccatttcttgagtgtttcatttccaaggcctgtcagagggaggcagtctttagcattctctgactgtgctggtattactgggaaacaacagtcttctcttaaaaggcaatttcagaaaacaactgcaactgaatgactcaggaagagaaaggaaaggggaataggatgagtgaaatgtatggcccaagagcttttggagtctggaagaacaaaggaggaataaaggatgggtacgtggcaagaggagacccatgttacagagtgtccatgatcatgcagtgaccatccagcttggctctgctgtcgcctgcagagaatacactaatgaaacaagtgagtcttgggtgaggggtggtgtggaatcgtgcttggtggaagcatcttttgaatcacagggtctttcatgctgatccttgaggcgctgaaaacttcacagaactgccatctgggttcaaatggggacatttagaaagttcttcaaattcactcctctcaatgacttttgcccgaagactccaagcccacaattactttaacctgaatgaacagaaagtatcatccatgctgtttaattctcagtggcctcttggactagcctgaaagtcacagctcccccaacccccaaaatataagttaagaaagaagcctgaaggtgatggaataaacactacggcttgtctttcttatttttaggggctctttgagagagggggaatcaggaagtgtaggagtgagcaaagtgattctgggcagaaacctgaatggatatgacaaggacgagggatcctttgtccgggagctggtaaatccctgggggctgcctgtattgtcacatttgcttgcgaggacacctggcattgtatccaccactgccagatcatctctagatccacaagaaccaggatctttggccaggactgagagcaactcacatctgacaaaagcctgttcacctcttaaaagaagcccctttttattttcctagcaggagggtgttggaggtcatgatttctgagcatgctagtgacatggcttttggcatttccattagcatccctgttctagagaatccccatatgctgcgaaaattgatctcaaaacagtatatcatatatatcaccgtctgaggagggacgaaaacccaccaagagtgtgatttgtgggggcccattgcttgagtgtagagggctcagactctgaggtcagcttatgtgcctgagggcagctcacagcaggccctgcagggatagctgagagcctgccctggtcttggaggagaaagagatagggagtgtgcaccaggagacatctacatgttccaccagtgcccagaagttgttgtcaggtttgacttcagatcccaaactgtaggtgctcgttggctgcaatctcacagctttggccacagagtgatagccgttctgcaggcctctctagagagatctgtgtcttcaattgtgaatgactcctcatcaggaagggacatctgggtagcactgcactgagtcccacatgaatgaatacttccaggttgagaggagaaaccaaacccacaaaagcctatgccctgctcctaacacatgtggatatgagtgtacacctaacaatcgcacgtattaaaagatatgggaatatacggactcagaagcctgcaactcatagggaattggggatggtgagtgggtgggtggcttgagagaggagagtaagccagcatgtttacttgagttgaagttggtcagagtcagatattaatggtgtaggctctgaaaattatgacttgcctggagctctggctcaagcccacagaagtattaatagattatttttaatgtatttatttgtttattaattcattcggtaaatatttattgaacacccattcttacttagtagtatattaggctctgggaatacagtggtgagcaaatcagaacccatgtcttcatgggtttcatgccttctagggaggcacacaagaaaataagcaagtcatatacaggataaatattgttatattggaggtataaggatgttattagagcacacgtgagcaacctccaacttggatggaggcttcctggaggtggtgtcatctaagctgtcatctgaaggatgagaagaagttaagacaatgaaggaatgggggagaaagggaagaatgccaggctgagagtcaaggtaggtaaatgtccagagtagggagagagtaagacaagttcatggaactgaaaatgggagtggggaggcgggctaagatctgaacttggagaagtaaatgggcattaaatggtgaaaggcccttgaaaaccattttaagtagtttttgcctttttctggggacaatagggaagtaatgaaaggatcttaatcaggggagggacatcaggtgatgtcatggaaaagttactttgactacttggttttgactcaactggtgggtttaagctgaaggcagggagattgggataatattgccatcatttaggcaaagaatatggtagtctgaaccagtgttgctgtatgagggggtggataaataaatgcacaaaaagatactagaaatccgaaaacatttggtaattgatctctttcgagaggtgagagaggaatctaggataatgcccacttttcttgcttgggcaactgagtgatagtggagttctttactgaaatgaagaatacaagaaaaaagagctttttttattgttatcgttaggatactgaacagttttcatatacagtagcagggtgtgcatgacatccaaaggtagggtgtgcctaggaggcatgtgggtatacagacgtatctggaattcagaagagagagacccactggatatgtccattttggagttgtcatcaacatataaatgatcattgaagcccttggaactgggtgagtttatataacaagagagtatagaaagagaagagagcttggaatagaatccagaggaaccccaacatattccacccctccagaacaatcccaatccacgatggagattgaggagttgctggaagaaataggagggacaccagaagagtgtggtgtcatggaagctaaaggaagaggtttcaaaaagaaaaaagcagtcagttttagatggtgctgagaagtcccctaagaggcagactaaaaaatgtctgttgctcttagtgacatgggagtcgctgggtatcaaaggcaaacagttttggtgtcagtggaatgatagaagcaggagtgggattacagtgggttgaggagttagtgagcaattgggaggtagaggcaacgtgggtaggcagctctaggagtggaggaggtggttagttagaccgatccaagcttagggtacagcaggctggtgaaattgaaggatcccaggcaggggagttcaggaattggccagaagtcagtggggagttggacgacgggccttgaagtgtgggccgaatatgaaagaagtaaggaaaggaaaggcattctagggagatttttgaagatcaaataatgggtttggtgggagtaactggatgggagaatttaaaaggtgggaatgaggtttgaatataacactgtagagatagagctcttcttggtgatgaaagacatagagtgttctctataagcacctcctagagggggcctaagtgcagctcatggtacctgtcttagtctgttttgtgctgctgtagcagaatgcctgagggtgggtaatgtatacagaacaaaaatgtatttggttcacagttttgaaggctaagtccaagatcagggtgccagcgtcttacaagggccttcttgctgcaccactccatggtggaaggcgagagggcaagagagagcagagcacaagaggggactagattcattttttcctaaggaacccactcccttgagaacgacattaatccacgcgtgagggcacagcccccatgacccaaacacctcccaagaggccccacctcccaacactgctgcattaagatcaagtttccaacacaggaactttgggggacacatttaaaccatagaagtacctaagttaaaacaccacagcccactgatttaaatatctgtaccccacacccttcttcacccagccactggatcagtgttctaagcagctactgtttctccatcccctaatcatgtgacactgtgatagacattgttcatatattatctctaatctgcccagcaaccttgcatggtgggtactataactctaatacagaaaggaaactaagacccagagatactaagtgatttgcatatgattatgtagttagtaaataaatggaagagtcagaatttgaacccaggtgtggtctgacttcaacaccgaggctctttgctttgtacttctcagactgtaagcttcttggggccaagaagtattttcttatcattgtgtagcctcagggtttgattcctatacagaattgggactcaagaaatttgaggtgcatgagtgagtcagtaagtgagtaactgagtgaggggtacataaagtaactctctaatgctgttccccaggggaaataaagcaccaccacccaaagagagaaatgaagagcactggacagaagaaaggaagagcagaaagatttggccatcaagcgatgctggtgttgggtagctagaacagaggtgtctctcttcactactgtttctaaccagggtgctggacagcctgtggttggcctgagagagtcagccctaaggcctccatctgccccagcatcaaccccaggctccagagctgtcaggcagtggcccaaaaactccagaggaggagctgaaaggggaggtacctaagaaacaaaacccacatgggaggagagaaccccaaaccacgaagtgacattctacttcacgtttccttttagtgtcggcatctgaggctggggtttctctccagaccctccttcagagtgcccagggttggcgtgtctgaatgtgtgagagtgttgggagggaccacgctgcccatgaggagcatgcacaccacctgacatgaccttgaactccagccagatgcctaccagacactcgtcttccttccctgaaactgatttatagaatcaggagagcaacctacttgaaaggagggtagttccagatgtgggggtaatgggaaatggtagtgggcaatgtgctcttttattttactatttttctttatcatatcatattcctctctctccctccccaaatagcaagaaggacagtatcttccttccaggctttaaaatcccttgcatgcagcctgacgttgcctaaaagcctctccctcaggcctacggactccctctcattgcttgcctattcagtaagcctataaatttactgtcccctgtccaccaccatcaccaccagcctgttgtggcagggaaggtggcctggtgagcccagtggactccagcaggactgcagcaaggggatactgctttgtgcagcagccggagcagcgctgtccctgaggtctgcaggaaagtcctggggcccaggaagacagtggcccatcacccccagtattgcacatcaggtatcccccacctgtgtgcaccatgcacacccccaccatccacctcctgggccccatgtgctgggggaaggtgtggtcagcagacaggggaggatgtcatgctgacggagccccttagaacaataggagcttcacaggatcacaaagcctatcccccctcaggttacagaagagttgaagtccagagaaatcaaattcatttgtgcaatcctttatccatctattcgtccttctctccatccaataaatattcattgaacacctgtcagaaccaagagatagagtgctgtataagagaagtgaggtcgcagctctcatgcagctttcattctgacaggtggggaagacagtaaaccttgaacttaaagcaagtctctaagtcttgtgggtgtcacagctgaagactaaggctgggcctcctgtagtgtcctttgcaaggccccatactccctgcttcctgggaggccaagcatttagtttggctctccattgcagatggagaagtttgagggaataaataccagtttggactagatacttctgggcggcagaagggtacaggtagtttcagaccaggattggtttttaattttttaattttggtaaattatatgtaatgcaaaatttgcatttttaaccattttaagaggacaattcagtggcattaaatacattagcattgtcatgcaaccatcaacacacactgtatctccagaactcttatcatcccgtaaaacagaaactccgtacccattaaacaccaactccccattccttccctgactcctagacagggattcttaacttttttgtgccattggctccctggtcagtctggcgaaacccctgaactcttcctcagaatcaggtctctaaatgcagaaagtaaaatacataggattgtcatggaaacttgaaatacaaatatcaaaatattttttaaaaaccatttgtaatatagtaatatgtgtgattctttgttatcccattaaccaataacatcaggctgtaattgaataactaccatatttttgcgggagtggcttgcatagatgatattttgagatgactgcaacatttctagtgcagtgtgaaaatacctgtaatgtctaccggtgaccaagtagttaccagtactgcccatatgacttggtggttgcttatattcctaatggaaggagctactgaatttcagttggaggttggtgaaaataaagatgtcacttttttcccctctctgagttcaccaatctcctgaattctgtccctggacagcttaggggttccgtggactccaggttaagaagccgtgcctagacctgagctcactccccttttctgcctagaggggcagtgcacagtgcacggggctgggagcgtgttgatacgtaggatgtcgtgagtgaagcagtccctttgcagggcatcacaggagcccagccaaggggaaaaggtgcccccactctccccaggccgccagcctgctgtctgaggtgggcggggccggtgccccctagaagtgtgccttctggcagcttcccccgcccccttccaccctcttgtccaagggctcaatgcagaagggagccatatggtcctttgtggacacattttccctagtacagtatcttcctggtgtgaatgcaggcctggcgggcgccctggtgtcagctgtccctccccttccctggcgccccatcccccatagccagcccagagagtagcaggttgtggggagtcggggagccctgcagagtcggggtgagtaaggagtctttcagtaacacccacacacacactcacacagaaaactgtggaagtgaagtcaaacgtctcaaagtcagatccctttttggtatgaatttgctgtgtctcattctgggcactaattccaatttaattgcgagtggcctgaagcctcttcaataggagtaacaaatggtttgattttgtaaacttcatcagactgcattttaaatgcgacacagtagcccaactcgaatgccaatgaagcactggagtagctctctgtttactaattatccgtttttactccaagccacgctggctggcttgtctgattaaatcggatttgtgggatagagaacagctagcagagttttctctatagtaaacgagattgaaactatgggccgcctggctgcacactgtaaattatatttccttttaaaggggacgtgtctcttttatttctctgtcatccctcctgcatattaaactttacggtacagaagtatacccggctgcttctaaatccagcctctcaccctccacctggtagcccactctcactttctgtgatttccgtctccttctctgaaggactggaaaggaaattcgtagctacgttctctgctcctttatctttttaacccttttcttttcttcctctttattctggaattggcttttcattattccattattttcaaagatacctgtgatgacatggatgcttagaaactatattgagttagctaaaagagagttctggcaacagaatttaccaggacctaacacagactgggttttagctttttagaaggatgtgaagatgggtggtattgggccggggcaggcaggggttgggcatgaattggtaatgatagtttgaattgtgaaaaaagagtcaatttctgaaaaatcaaatgtgttcctttggttcacctggaatgatgaaatcccttcctctgaacgcagtgaaatcagaatcacctgatttctacctgtggcccagcggagaaggccgtggggcaggtgttggaagggtgaacgttggtggtcccgccctctcggttgaagcccaggttggggcagtgggtgtgtcctctttctactccctggctggttctgggtctgacgtagagctcctgggctcgatttattgtttattcctctgaccctaggaaggcaaaacaacctctgtccttggtccttcctgtaatgtgcacgtgcatgtgcaacacacacatgcacacacatgcaggtacatgaaacaaacgcaaggagccctgaatcaggtgtaatcagactgtgcgtacattctgccgttgctaagaccaactccatgagctcgacctgccctgccctcattcttggtatctatgtatgctctgggagcttttttatattttaatttgcttctgaatgtcctgcagaattaacagtatctgtctgcacttttccctttttggctattgtgtgccgtacagtacgggaaggccgcatggtgtctctgatattgatagcctggttaccgtgggaatgaatggccaccacactctcaggcccacagccctccttttaattgttgacagtaaaaagcatttaaatgctgcttaatttgtaatcatcttctgtgggggggggggcggaaaggagaggagccattaaaatgtcagtaaaatgaatacatcctctccttttttgttattttgttttgcttatttatatggggtagtttttcttttcattgcccagtgtttgggagatatttaaatggcgctgaaacaatcagtatttcgttttattttgaatttctgtctcgcccaacccctgctcccctccccactccattctgtctccctgggcctttgtcttgcctctgtctctctctcttttctgtctgggtctcctcctgcctcctgcctctgcctccacctccctatctctggaatacattggggtttactggaaattttacatgagagcctagccgaggtttttgggtttttttcccccagagaacctactcctgggctgcagtttctctgcaggggcctcaggatgactttgggaatgtctgaaactagagagagtgaccatctatagaaagcatcttttacacgtgaagtatactggagatgaaagagtcctggggataacttattgttcagacaaggaaattgggtcttaccttcacgtggaaactccgtgcctcccgtgaagctctggacacacagccagaatgtaaatgcctactatgtgttggacactgtgctcttgtaatgaaactgctagattcagagggtctggttctctgacttgctctctatatgggctttcttgggggtcttctctatcattctgctgctgggggcttgggagagaaagctccccctccatattccccaccccaactgctcagccctcacctggcacagagaggcttcgggtactctcagacccagctactcaataattgcctctgtgagtgttcagccagttctaggaggtcttaagctgctaactggtagtcccctagaaaagggacctagaggttctctcaagtcctgtgaaattttcccatcttcctaaaaatccccatctcacagtgctgcttgagaaaggttgaacctagattggcacccagcaggtgcccagtcaatgttggatcctttctttgccttgtctgtgactgtccctctgtcagcctaagaatgtggttccttttagttaaagagattctctttagctaaaagaaggctgtgaagtctgactttgaaagagaaaatgctgacgtccatctcagtgggagaaaggaccattcaacctgccagcaccctcttcaatagaattgttgaatattagagtggagaaaaaccctttaaggatcacttatatccctcttcattttactgttgaggaaactgaggcccagaaaggtctagtaacccacccaggagtgcacagcgagttagtcactgagccaggacttgaggccaggttttgtactcttgttcctgttcagttgggagtctgcagtaaaaagccacgtgagggcaagaggatggctgggatgtgaagatcctggcctgccctttcatgctccgtcccgatgttcccccacccgctttggggcttcttttcctggaagcctctaagatcagctgaattcgagaccaagggacccatatttcttgcagtgctcatgcaaccttgcagagggttacaggcagaatacatgccagggaatggacttaggaagaaactgattgtagcttttggtttatttgctacccatctacccccaaatgcaggaagtagggagccctttggctttaggaaccctgagagtaaacaggtgcctgtctctctcctttgaacttcatttctacagaacaagcagtgtagagaaaccgaggaaaacagttctctgcatcttgggagaagttgttgagcacggggccctcaagtcggcaccctgcctacttgctccatcccacagtccatcattctcccagcctgatcccatctcagaggcacctctctgccagaacgggcagtccctgagagaggcttccacatcagatgccccacccagggttgggctgggttgggttgggctgggctaggctaggcttgctctgcagagctgggctaggttaggctactgcaagctgcccttctcctctctgggttgttgaagttggtccgatttttcaatcgtgggccaattagtttcacaaatgggggcccccgtggtgccagggcacatttgttccgggcctgcgcactggccaggccccattgttctgcctcccacccccgtgtgggcccattgtcctcgcccccagcgggtgctgcttactactgatttatacgggcaggcgtcctgcgggctccaggcttctctgccacagctggcggaggtgcttaaggccttggaccccgtgacctttgccctagtcctgctgtcattttgaaagttacagaccagagggctgcatacctctccggatttactttccaccccaactcatcccccccgccccacccactctattgcacatacgcatgcgcgcgcacgcgcgcgcgcacacacacacacacacacacacacacacacacactctctcacactccctttccttcttcctctgcttgctcttggagaagttttaattcattttggaatgtctggaagggtccagccactggactggaaaccaagaagaaggagctgctggggcaggtgggaggtaccagccgaggatattagtctctgctgatgtgcttggaagcagctacttcccggaatgtggtttttaatcctcggattcattagttccatatctgatgctgggaggaagggaggaggatgttgctgtcggtgtggcactgccagggaatcaggacttgatttggcttcttgcaacttaacatgcccccttcctgccagaggcccctgcaccctagaaagggcaacgcagcgtaggaggtagattgaatgtgaaggtggttttgtagcccagtacgaaaatgcagatcttgtcccctcttaacccgtttattctctctctccttgcaaaccaaacttctctcctcctttttttttaaaacctccttccctttttttatccaccccttttcttgtccccctccctcattttctccccctcttgggctggtttgttggagtgattgacaaaattagtaaatccattcatgttacttttattgtgcaggtctcaataaatcccccatgtccagggcgcaccttaatgagctagtgagctgacaaatttgtttactgtagctggaggtgccgagtaatgaaatgcacttgtgtctgcagctcactgctaaacaaatacacggttttccgggagccagctctgctagctgctgctgcctgaggacacagccacattccccaagagactgaaagttgtatgtgtgcatatgttttgaaaaatgtaatcactctctcatccattgcttagttttaaaacaaatctgaatcagctgctcaaactcctccccttttttgttatgcaatgaagatgcttttgctcccttgactgacggtattgaaaccgtaacattccccttttctcttgtggaaatggaatgtcatacagatgtatagatgccttccatgattctacgcagataagaaaggaaggaaaaaggggcagagagggctggataaagagacctaaaattgacaaggacgaaattgacaagtgatgctaaggtttttggctcttagcttggtttgggaagatgtaactgaacgcctcagcagtgggtgactctatatgcaggagacaaacacccatgcatgagctcaaagctaattgagtttgagacaagtcttcgaagatggtatctttgtgtattctaccccagtaaaaggaactggggaacttgtctcccactcaccagcagctgattggagtttccagggttcggtgggctgatttggccttcattgcccacatagctagccttctgaggaacgccaggagtacagtagtgcatctctaatgatcctgaaactcatgcccaagaggaaaaccagagaactaaagagagggctcttggccatttgtccagtagattccttgaaaaggaggtgagccctaaatgatagcacagtggaagtcaaaatggaggagccactcagattcaagggctggactttgttcctttctgtctattcctcaccccaccccagccttctccatccttttaagatgcagacagagccttccttccttgggtgggagtcagcctgatgctgcttgcctctgcctctctttctctcttgccgagtggatggtacagccctgctacctttttcagcagcaacctgggggcaaagggaggagaagatgggtgaaaggaaaaggcgtcagtttatatgatggtttgaatgtgtggtcacgaaggttgcccatgctggagatggtgtcttaggaaagagtaatcccccaggatgtcagagggagcagaaagacatatctgaaggatttgggggctgggggtggagggagggggaagtttctagtttaaatcaaggttttcacaccctcctaaatttgatattttctttctgtggggagaagaagctttcggggtggcaggggaggcagtccttcctttgttgggtgaggttgggtaggattggacgtgagaagcccctccggggtacatgtgcatgcacgagcacacacgggcatgcacacaccccagcacatgcacacacagcagtcccagcctgcttaccaaaaaaagctggagtatatttagatccctctgctcctttgattaagaaactgcttatagcaggagataataagagctttgctccaagaaggtgtagcacctgaacatcttctccagctgtgtacccctctgatcctcttccttcccatctattaaagagataattggtatggaaatggcacaggtgtaaacatgaggggttttgtgtttcataatttcagaccccgtcatcacctgggtgaaataccctaggtctgtgtcaccccttctgcctactattccaccctggcctggctttctccctttctctctctttctttctttccctctccctttctttctttctttctttctttctttctttctttctttctttctttctttctttctttctttctttctttctatctttctttcttttctttctttctttttctttctttctttcttttcttttctttccttccttccttccttccttcgttccttccttccttccttctccttttttttttttttgctaaaattaagcttgttttaaattggaagactttgagtcatacatgccctgtagtcaaaactggcagtgttgccactggggggtctggtgtgggtcaccttctctggagatagaattgatgcaaatgtggtcccagatatttgcatggatcctgcccatattactaagagtcatgttccttgagtcttgatagcatcatcctttctacatgcatccccttttcctacttcagattccctttgagcagataccctgggagtccaggctaagactgagtcccattcattcttcagaacagcagaggtgctaattccttgacctgaaaaattattttcttgggtcaaagctgacttatatatctgatttacattgaaatgtacagattgatagaaaacaatacatttttaggatttacataatcaaaaacatttgtcagttgcatcataacagggctatgaagttagggttggaaagggcaggttagttatgaattctcttatcctagatgaagaaaccaaggttaaggacaaccactgcctggactaggatcacaaatccaagaagggctgtacctctgggccagaattgggatctttggactgtttcactgtataatatggcaaaactgatccttctatggtctgtgtttttgcttccgagcaacagagctcagacatggagtgacaacgaaggagtcctgtccagcccaccagacagacacggggggcctcagtgagatccgctgcctgtgggtcacttgtcattactgatttccaaggagagtcttgttggatgctcttagtagtggtttcatttgtggactgtagtctgaactttcctcatccctagccctctgtctgtaccatgactctcctcatacctcctcctctaccctttgtgattgtcttacaaccccttatttattttctaattcaacatgcagttattaagtgcctactccatatcaggctgtgtactgtgtgttggggaatataaagatgaatacaatagttcctactttggaggcttataatctattaggcagagctgaaagtccaaaataaatgcaatacagggctttacgtgatacaacagagctcagaggaagatggtgttgttggcactgaatcctaagtggtgtaactcctcaaagatgccttctctagggtcagcttcccagaaagtagcagcccaaagacaacaaaacagcttaggcatgtgtattgtgcagggctgccatgactcatgatccaggtcgttcactgcacaagggtgcccagctgaggagggaagatcccaaaaccctgccctctctgtactcaccataaatatgcagccaggtctgtggggctggccagaggaggagacgtgattttctaattcagatgaaggtgttgtttggccatcattggctctgtgaccacattataaagttttttcgtgtggatatctcattcgatgttcttgataaccacagtggcagataaggagcaaatggatctggtgaaaagaatgacttgctcggggccacaaggcaagtatgtgggagagctgggacccctgtgctgcttttccttcccctgtgtcatgtggaccatctgacttctgagggtctcgtttatccagtcagagcacctcccctctccccagtggtaccaggcctgacgtctctccatagcagaggacggaacccaggcgttgaagggagcagagcgttccagtgctgccgggcccccctgccccgccgcacatctcactgcagctaatgaattgctaatacaattttctagataattttatttccatagtcccacattttaatgtgtttccaaaagctagcatttatttgcttaatctcccagtgtaatagaatctgccctgactcatcatacatgcgaacaatcagctaggctgaaacgccagcaaattgtttaataactcacatctagtctctagatttttaactcgcatgcaccaatagcttttcttgtgtctcatccacatctcccccacttttccatttttttaaaaatacttttctatcatcatagctgttagtttctaagcagaaaaatggggaaagtggatgctgagtctcagaggctcccctttcttcccctgggagccttggttggtggatacgtgaccaaggagcacccctgcaccttgtggaatgtcccaggaaggggagagagaccactgtagggacatcatagtgtttcctttccagctggtgaccatatgacttccagcctgttggccagttgtggaactggccatctgggattttttgcgtgccactcctcccttgctgtcccacctttctaggattttctctctccctttgccctggcagcctctgccctggtctggtccctaccctcctccagtggcccatcagccctctcgctgcttctaaccgcttgctgctgctgttggtccccatgtgtgcccagagtcactggcttcaaacacaggtcagatcgtgctagcaccactcgtcttagtcaagtcaggctgctataacaaactgccacggactgggtggcttatacacagcagacatgcatttctcacagctctggaggctgggaagtctgtgattggggtgccagcatgttcaggttctggtgagggtcctcctcctggttgcagactgctgatttctcggtgtcctcacgtggtggaaggggctagctagctctctgggccctcttttacaaggacactcattccattttaattacctaattatctctcccaggccccacttcctaataccatcaccttaggggttaggatttcaaaaaaggaatcagagggggacccagacattaggatcatagcaaccctcggtcctttcatggcactgcattgcctgtagaataaagtccaacctgtcctgcctggcatgtgcagccctctgatctgactcccatcaccctcccagcttgtctccatccccagggcctgaccttggccccatctgctctgacatttgccagtggtgtctctctccttagcctggcacatgtgtcccaacttcttgtcctttgcttctcagatactcaacttttaaaagcctaactcaaaatctcaggagctcttggagtcgccctgccttaccctctgggtggttgttaactcagcatctcccactagtctgggacccagtttctctgctcagccttagcctgcccctggtcacctagcacagtgcctgtacttggtagtggctcagtgagttggctgaatggacatgaagtgggttcaggccaccctgagaagtagggacagcatagtggggcagtatcgaggggccttggaaagaccaagggggcagagtgctgcagtctgccttgctgggtgtattgacactcagagcacctgtgggtctggctgtataggctgagatgtcctattgggaatgccattcatgttccctctgcccaggttccttccatgccggggatctcagaggatgcataaggagaagccttggctcttaaagggcatggctggcctccaaagcctactcaaccctactgatttaaggtagctgtttgaacacctggcttaatttgggctctctgtggggtgggggttaagggcagagagggagtagatgctgggggctctcaagttgaaggagtgggggccaccgggcacagaacgcattgcagatgcactgtcctcctgtgtacgtcggccaagcagggagggatattgaagactcactgtcaactcttggcattgcttctgtccagaaagatacatctctcattatgtctccctccagcaagtgaagctgagtagactactcagcatttctgagagaccttggtggctcccagtgggattggaaggcctcagagagctatgccttgtgacccagccccagctactgcccactcctggccaggggttctctagccattgctggagctgtactagaggcaggagtcctctgtaccgtccttactgggcttcttccagggtaagcccagacaggcgggcagtcagctccagaggtagcattgagtccagccccgtggtttctgaaagacaaaccgagatattttcagatcccaactctgcctctttctgtgtgatcttaggcaagttatttaatctctcttttacactggtaaaaagggggataagaatgcctgccttgtaggattgcaagttttaaatgaactgacaacatagataaggtacctagcataacgcctagattcgctccccttccttcctgctttttgttggccaggagcaaaatccagtgctggctgtttttctccttccctgctcagccttcctgactgctggtgagatggggcgtggctccaggtgcttagacttcagtgtctgcaaagggaagggatatcagggtgggtgtgaggggcacagaagtgtgggggacagtgagaggtgggccttgcctgcctactagtccatcctaacccagccatgagtgggacggaggtggtgaggaccagacctctcacttgctatctccattgatggccaggaaggcagggaggttcttcgtgccatcccttctcttccccctaccttccaccagacacttcccgattccatgctgagcagcccatggcttccagcagccaaagctttaccccctccccccacccactctggactggactgacagatgctaggcctacttacgtttcctgcttgtgccttcccacacaggggacagcggtgtggggccaagtgcaggtgatattgcccaggcaccagcacagagacacacagatgggcctgccggggagctcctgtgctcaggaaaacagagcccaaaagggtgggcactgagctgccagttaggactcagacacaaggtcagatacttcctcctgtggtgctgcagctggaaatttcggccatggctccagagcagtgtcagaaagggattggtaacaaacagaaaatggcagcctgtatgtgtggggtactttggggatgaacagccagttagaattaaatgaaaatctcacatcactcgctagctttcaatcctttgacagttgcccatcgggtttaggatggaactaaatctcttgacgtggtttgcaagaccctgcatggcctggcccttgcctttccctttagcctcctcttcttccccagctgcactgcaccattcctctgtctgatcctcccaccggccatgtttcctcctggcccagagtgttcacagacactattccatcttccggattccgccattcacctggtgttctgggtaacgtcggtcatgagagcagggactttgcatgctcttccttggttatatccccagtgccaaaaagacagccttgcttgtagaaggcatcaaataatacttgttgagtgaatggacctaagattcatgctttagtgagtggagaagtagttaaaaaaaaaaaacaaaacaggatctgtagctagtcttgggaaagcattaaaatctagggtgtgtgagtgtgaaccccagccctgccacttacgaactctatggcaggagtccccaacccccgggccatggtctgtgaggagctgggctgcacagcaggaggcgagcgagtgaaactgagctccgcctcctgtcatattagtggcgacattagattctcacaggagcatgaaccctattgggaactgtgcattcaagggatccaggctgcacactccttatgagagtctaatgataaatgtaatgtgcttgaatcatcccaaagccatcccccaaccatacgtggaaaaattgccttccatgaaaccagtcccttgtgccaaaaatgttggggaccactgctctgtgggattttggccaaagtacttaatctctctgtgcctcagtctccttgtctaagggatgaggataacagaggctagctttttgagttttggatttatattagttatgttagaacaatggctggcccatagtatctttgttattgttttttctcgcagggtctaccttgcctcccccactttttgccctgtactctgtgaagtccatctggtatatgctgtcttagtaccttgccgccttttacataccacccgacacagttgcccattacccttgctgctgcgatgtatttgatcaatgtctatcctttagctttagcttccagagctcgggaacgacgtcgattttgcccatcactggggccacatactgggtgctcagtgttgcatagcctgggcccactctggatttgcccctgagcatggggatttggaggtgtgagtcccgacactggctctcactccagatgggtaaagaatgcaccttgtattcccacctttctgaggcaccccctctcctgtctcccacaggcactgacatggccgtcttctgtctgctgtgtgggaagcgcttccaggcgcagagcgcactgcagcagcacatggaggtccacgcgggcgtgcgcagctacatctgcagtgagtgcaaccgcaccttccccagccacacggctctcaaacgccacctgcgctcacatacaggtaggtcagtccagctgatgggtggatctgggtctctgggagccagcgtctatatttacctccaaggacgtaaagtggaggtggtgggctgagtcagccttcagtccttctgctcaaggcttggacgtgcagaggctgcccgtcgtgcaggtaaatgtggacagttctcccagtcccctcctgtggaccgtcggttcaaagtctttccgtgttcaacacaggatgctcattaaaaaggcaggctcttgggtcccactctcagaaccttttattccatgggtccagggtggggtcccagattcagcattattaatatgtattcccaagggattctcatgtaggtagacccaaaatgaattttgagaaaaactgacctgctgggtctcttaacattgtctgccctgcctcccaccactcttgatgccccgccgctctatccatacacatttctgaagtcagcttcgggcttctgagggcaagttgaagcagtgatcctactttccccacagtaacaaaggcctgtacttggaccttaaccctgtttagggaagacaaggagggcatttaaacgatgagcaatgaaatatcactgctcagccagttccaggtgatgggacaagggagggggtacgaggtaaggaggctgggccaggtgctgaggggctggccattccctgccaccagcctctagggcttcagggatggggacacttggtccctgatggccaagaggcatttgctttcctgcagcagctcccagttttccctaacaggggagtggatggcttaaattccttattttctctatgacaaaactggggctctgctgaaactacctggttaaaggaatgcccatttctgagtctgcctttgtgtgctgtgtttgtagggagggttggggtcaggtctctatctgggtatataacagagcgtatacttgtaaaaacctctgcatgccacgtaaaggaacagtaggccctctcctcattttgagagtcttgtcacagctcagagattgagtatgcagaccaggtcttgcatgggtggcaggctctgctaaataagggaagagctttacttctcatggactgagctggcctggccagccagcagcaggtatcctcattaaggagccttcctggctgtcacttctggatgccattttgttcaggggagcacattgtcttagcatcaccagatttgcacagaactacttaaaatttctgggacaggacggaggtagggcccagaggggtgggctcaataaaaagggcccaggagagtgggatgttgacaaggactttctctacagcgattgcgtaagcatttcccctgcagctatatgcaccttcctatgaacgcctccctcaacagttccccaggttcattcggtcttatgaaagatggctagatacctttcagccacttctgagcatgccactgggtccaatcagttggcttcatgtgacttgaatgatctcagtcctgctaaatccacccaggatgtgccctgctctgaccatgccaccttctcagagctcagatatgaaaatgtcacatgctcttgtgtcagtcatggctcagatccacggggaggggctgtttccagagttagggagaagcccttgcttattctaggaaacacggagcatgtgtgctgcctatgcacacacagagaaacacccatcaattttcacaccagcgaggcactgcgcacacaagccatatacaggctgtgcacaccccacacacaatgcctcattaatattccgttgttcttggcccatttgctgctggggccgggtgtttagcatcagcagctgtgtttggtaggttagtccagccgtgctcttggcattgatggatccctgattcacacggctcatcatataataaactctcagctgtgctgaagggaggggctggaagggaggggcctgaggagccagcaggatggggctggggtggggaggacgacagacactgggcttggccagtgccagagaaagcaccaagtaaggacagattggggggggcggggtcacaggtgcactgggcaggctggagggggctctaattagtctcgtttgtcctgcacttaatgtcaagctcattaaagaggctacagagttaatcaacataccacaaattggattttgagttctgcagccagttttgtgtacattatggccacactgacacaatcagctctcagggtgaagatttcacgccaggtgcacaccgtgcttccaaatcgggatggggatacgtgtgtgttggtgactttttctttcttttttttttgttgttgtttgtttttccttctaagttctttttattcttttccctgggcagactcaagaatttcctatttaaactcatttaacatgtgctccacttcataattaaattcctaaaaatcggatcaaacaaactcctctgtcttaaccctttgttttttaaattgttagggacccctctggaggggaaaggcacaggcagccgcccccttcccccccaccgccgccttcacccccacccggctgggtggctgccgatgtacgttttaattaccggctccggctgaagtctcacgtggccttggctttatttatttatttataccttaatgaggatactgaatctttgattaaagtcgtaatcgttgccgattcagtaaggagggggagttggatgtcagaccagacagggctgtgagtgcagacacacggagagagtgggttcgggtgcacacacagactggcccttactgtgttagacacacaactaattagtaccagggtctgcacaggcctccactcccttgagtttgatggggctgggggccaggcagtccgcatggctctggcagtgaggatgggcaggtagcaatttccccaactgagaaccctgggccttggcccatccccagatctgcaggtgagggactcgctggccgagcctctgagccagtgcaacaccccatagattggggtgaactggtgtcaaggcacgatgccactctttgagcttctctcatctgattccgtgatggaagtgcccctctcatggcatgggtgcttcttgcaaatcttccacccatgagaaagtcactgatcataccccagcatccgctccccctcagagccgtaaaaacccctcagagccatcagaacagatgagaatttatgtgggtacaggggcctaactttgggaggggggagctttggttagtggcccgaggaggggagagacaggagagagtaaaatatcattttaaaaaggaagtgaaggcacaggcatgcgagtctataacgagaaggacaatttatgcccaggcacgagcgcagtttgacatggggataatgcaaaaacgtaggtcattgtggatgacttaaaccttcagcagctgaagaaaatgtatgaaatgcagaggacattacacggttggcagccccgcacatctgcagagggacaagtgaaatacagtgggccattctttaccataaactgtggttgttggagatgcagcccagagaaattgtaattacagtgacaagacgaatcagcgatatttaaatattcatgaacaaagtctggggtgatcaatctatctttattgtctgcgccttcactcctgtaataaataagtagctggagtcctcacctttcatcccccaagccccccactttggatatgaaaggcaagatggttattctccacaccccaacctctcatgctctggagatttaagagtgggatcctcaaaaaagaaaaggcagttctctccaagtttcatagacccaccatttcctgggtctgttctggatcctccctgtgcgatacactgaggctacaaggatgggtgaggcttgcttcttatcctggtggtgcttccatgctggaggtatggtgggcaagccagtagatacagcatagtgtgtcagcaagctgacaagtatatggtaccctgactctagagccagacccaaacctgaatcccaactcagctccttacttgccgtttcaccttagggatgatgtggaagcatctcatttttttctcaactgtaaaatgagactaatatctttctttaagtttgttgccatgatcatctgatgcgatcacatcacacatctgagtgctcaggaaatgtagcccattttaatgcgaaagtggcataaaaatgataccacactaataacagaacaaaattctgggcatttcttctctttggggacacagaagaaagtgtgattcattctgcctggggaactaaagggaagcgtccacgcgggggtatcatatgagctgggctttgaaggatgattaggagttcaccagggagaaaagaagaaatcgagcagaggaaacagctatgtaagactgtggaggaaggaaattggggactgtagaaggtgtttgggggacaatgtgaagttcctcaaattggagagatttctttgaaggttggggagtcaggctggagtgactttcacccttaacctaaaggaaggggagaagaggtcatctgagaagcaagatggtgaggtctcatgtatccacaagggggcttgctttctggggactgctgtccatccctgaaccaaatgggctctctttcccaggactggcccttgccccacagatgatcatggggccacagtaaagtatggtcatgtgtgaagacaggtattgcttgtttattcaatggaggtgtggccgtggatccttaagttgtctttggaggtggtgaatacaggccgtcgcatccttctcatgcacagaatgtgccctactgtcccctgaagagggggcagggagaggcaaaggcctgatccagccccttgtctccacaggcgaccacccctacgagtgtgagttctgtggcagctgcttccgggatgagagcacactcaagagccacaaacgcatccacacgggtgagaaaccctacgagtgcaatggctgtggcaagaagttcagcctcaagcatcagctggagacgcactatagggtgcacacaggtaccgaaggccagggaggggcctgagctggctctgggacctgggcggaggtgggaagcagatagtctcctagagaagcctaagtgaggatgatcccaggctgaatcaaagagtagaagaggttctattaagagctggtatggtggcctgaggaccaccacacccagtcaaggtggcctgagggccatcagtcaaggccaaggcagacattactaatcaatcccagcacactttccagtgagcccccatcagccctccaggcagctataccagtagttcagaggtgacatgcaaaatgatgtctgtatatgagtcctgaattaggggtaagttggtccaattagctgaaagtgaaggttagggtaatttcatgttactcaagggttagagtaagaattaggatacattgaattaggttgttatgaaggttgggaagttgtaaagttagattgtgtttggttctgagattagaagagcagatatatttaataatccctatatgcatatgatgttttaccacttcagagtgccttcacatttttttttttttagacggagtttcgctcttattggccaggccggagtgcagtggcacgatctcagttcactgcaatctctgcctcctgggttcaagcgattctcctgcctcagcctcccaattacctgggattacaggtgtgtgccaccacgcccagctaattttgtattttttttagtagagacagggttttgccatgttggtcaggctggtctcgaactcctgacctcaagtgattcacccgcctcggcctccaaagtgctgggattacaggcgtgagccaccgtgcccatccacattattttttgtattggaaaaagaaatgtgggccactgttttccctgaggtcaaaagacaaaacaagtgaagggtcttccacagtttcccaagttgggggcagtgaagtcctggagcttgcttgtgaaagctaatttttcacatttcttcacaacttcaagttcagtgacaccaccttagttgcttaaaattggccactgtaggagtattcacatcatagcaatcagcagatgctacaaaccagggctttttggaaagccagtcatgaaacatttaccaccagcacactgctggttgtggggaaggttgatttacagaagggtgagaggtggtggaagctggaaaacaaagacgccccctctgatcaggggagacagctgtcctgtccggaggaagggggagaggtggcttcaggcaggtcctgctggcttagaggagagtacgttgcccttggaggggaagggtggacagaaggagcagtaagcagagctatgtgttgtcagagctcgtttttcgtgtcccagtttgagcccacaaggagagggttgggtgtccgttgatgacaactatagtggcccagaggatttcccagagccctggggtttccttagccccttgtcagggatgtgacctggcaggtggatcattaactgtattggcagtgactattgtaaatagctggtcgatagttagatcactttggctgttcattacttcattatttgctggggcctgtgcgcgggggagtattgatagcgagatggctggccagttaattactgtattgaaacaaggttcccttacatcctctgctcagctctaggggactctatggaaggaaagttggggtatagaacgctagggtgtggctgtgcactcccaggttctttatccctcccatcccaccccacccccaattccagcctcaggagggaggcagggtccagggcaaggtcttagcggttttagcaggataggccaggtgggggagctcatgcctataatcccaggactttgggaggccgaggcaggcagatcacttgaagtcaggagttcaagtccagcccggccaacatggtgaaaccctgtctgtactaaaaatacaaaaattagccgggcatggtggcggcacctgtgatcccagctacttgggaggctgaggcaggacaatcacttgaacccgggaggcagaggttgcagtgagctgagattgcaccactgcattccagcctgggtaacagagtgagactccatctcaaaaaaaaaaaaaaaaaaaaaaaaggccgggcgcggtggctcacgcctgtaatcccagcactttgggaggccgaggcgggtggatcttgaggtcaggagatcgagaccatcctggctaacaaggtgaaaccccgtctctactaaaaatacaaaaaattagccgggcgcggtggcaggcgcctgtagtcccagctactcgggaggctgaggcaggagaatggcgtgaacccgggaagcggagcttgcagtgagccgagattgcgccactgcagtccgcagtctggcctgggcgacacagcgagactccgtctcaaaaaaaaaaaaaaaaaaaaaaaaaagagagctttagcaggataggtgtccccaggtgcagcatatttgaaggactgggttccctcaatttccccccacccctgctccccaccatctgtagccctgaaaggtctcgatccacctgctctctggacggaactgtggcttgaagagccattcctgaggactttggggcctttctctttctagacacccattttcttaattagaaagggaaaagactgtggccttgggagagttaagaatagtaagacaaggagctgggcagtccagtagtcaactagctacatgtagctatttaaattagttacaatgaaataaaattagaaaactgtagagctgcagtcgcaccagcctcattcatagccatgtgtgactggtggctgccgtcttgggtggtgccttcattgtcccagaaagttctgttggagcaagcccagctggaggaacccagcttccctggcacgcctgagggtgacatggtgccctcactgccttctgtctgtcctcactttctcctgccctgtccctccgccctcaggtgagaagccctttgagtgtaagctctgccaccagcgctcccgggactactcggccatgatcaagcacctgagaacgcacaacggcgcctcgccctaccagtgcaccatctgcacagagtactgccccagcctctcctccatgcagaagcacatgaagggccacaagcccgaggagatcccgcccgactggaggatagagaagacgtacctctacctgtgctatgtgtgaagggaggcccgcggcggtggagccgagcggggagccaggaaagaagagttggagtgagatgaaggaaggactatgacaaataaaaaaggaaaagaaaaaaaaaaacagaaggaaaaggaaacctggtagctttttggccttggattctctctgggctccagatgacctggatgccaagccactgcccctcctctgggggcctccaccctcctctcccggctggaggtttgcctgattttctgggatggggttgggtattttgttcactcaaatggtggcacatttttctccttccttcacccagaccttcttttatgtgtccagaaatggaggctagaaagcaggtgagaggtcctctggtcagagccacacggtctgtgccggccttcctccaccaagacccccaggagatgaagggagggaggaggtgagccagaagggcgctcccctgctgatgggtctgggctgggtcactagctgctcaaaatggcagctctagtttgctggcggctgactggggaggagaagggctctgtttctcttcccaccactcagcccacctgctgctttcctctgctttgccacatctgggtgtcccccggtggtctctgagagcctcaggacccctgcccctcctccagctctttgttcccagcctccccttgactcctgtcctccaagtcccaggggagtcccagcccctcagggacctggcggtgtctccatccttctccggttccctagtgggatagctgcctctgacttcagggtccctcctaccctcagccttctgagaacacaaaacaaatccaataccccaccctagtccagcaccatcgtgagcaagattcctgctgcgctgcttccaaaatggaaaagcatcacaactaaatacctaatatcctaccaaacaaaccacagtccctacgtagccctacttcagtcccaggagaaggaatccatgaatgggctgaggttccgagggtaggttgtggatgtctttctctagaggggtcccacacctggaaaagaggacacccagcccgtgggatgagggaagctgggcaagggagaaagttgttgagtcacactggggaccccagatgtagtgagctcagcaagaaaagccaggtccagagagagtcgcacagaattcctgactcacagcgcccctcggtccacagtggagaggaggaggaggaggagcagaaggagggggaggagctgcaggaggaggaggatttgaaagcgctttggccttgtgttatgttttgcttcttttctgtgtcccctgttagcacattgtacttgaattacctcagttttttgtgacctcatgagctttcttaacctctgtatctctttttcggttggggcttggaggaatggggagggtgttcttttctgtttcttgtgtaaattaatagttgtttttatagacttcagctggtcaagaccctccccgtgcccctggagaccagcctcccagctggcaggaactgtgcaggaggagttgatactcaggatctgaatgtgagggccgaggagggcgaagagtgtgggtggggaggggatgttgctttggggtctcatggtccccagagggcactagggagtcacttttggctccgctggtgcatgaagtcacctgtggccaccatccgttccgcctaaaacactctggagagaatcccacctttcttacaatttgctgggccattgaggtttgagggcctgtgtttggatccttgcaactgtgtggtctcacctctgtgcgtgcattctcattgccagaattggtctattttcacggctggtctttggggaggggggcgggatccagcctttgttttgttgtgttggggtgggggtgttgtttttctaaaagctacctcttatgtttgtccagttgttcttttgttcctttcccgcctcccattctgctgctcttcctccctcttttccccaacctcccccgaccctcctgaattttggaaagcacatttgcaatattcgtgtttgctttgggacggaccctccgtttcatctcatgctttatgtgtaagagttttttattattattttttctttcctttctctctctgagaaagttgtggctgcgttttgatcttaggttttacaaagtggtttagggaagcggttttggggagaaggatcacgaggaatgtagggaagccggagggatgggtgctgctgcgacgacccccccgtccctcggccccagccctcctgccctccccttcaatctcatccaccaaatctgaaggccttaaaattgtgtgttgggaggatgtgaattgggaggacggtgtcactagactgtggattagggatggtaaagtagggaggatgctattttgcaactatagtaacgacttagtgttttggaaaggaaaaggagttaaacttgaaatacgtgactagaacagttgtcatgtttataatgtgaaaa

SEQ ID NO: 22855 - DNA, 3907 bp, Homo Sapiens
gaaccggtagtccgcggtggcgcggtccgcccctcacctggccagcggcgggcgctgaggggcccaatgggagccgcggcctggccgccccgccccgcgcctccggacgtctgtgccgggacaaggccgccgctggtgccgggtccttgaggagagcgcctcccgtccgaggccagccgcctctgtcagccgtccgcgcgggccgggtctgaagcgccgccgggacggcgaagagccgcggccgccgcggagaaggaggcagcgcaggaggccggagcggccgccgcgcccgagcacatggcgtccatcttactgaggagctgccgcggccgggcgcccgcccgcctcccgccgccgcctcggtacaccgtcccgcggggtagtccaggggatcctgctcatctcagctgtgccagcaccctggggttgaggaactgcctgaatgttccatttggctgctgcactcccatccaccctgtgtacacatcctccagaggcgatcacctcggctgttgggctctgaggcccgagtgccttcgcatagtgtcgagagcgccatggacctctacctctgtgggttttgtggctgtgggacctcagtgccttcctgtgcgtggctggcactcttcgcgccctgttcgcgatgactcggtagtagagaagtccctcaagtccttgaaggacaagaacaagaagctggaggaaggcggcccggtgtacagcccccccgcagaggtggtggtgaagaagtccctggggcagcgggtgctggacgagctgaagcactactaccatggcttccgcctgctatggatcgacaccaagatcgcggcacgcatgctctggcgcatcctcaacggccacagcctgacccgccgggagcgcaggcagtttctccggatctgcgctgacctcttccgcctggtgccgttccttgtgttcgtggtggtgccgttcatggagtttctgctgcctgttgctgtgaagctcttccccaacatgttgccatccacatttgagactcagtcactcaaggaggagaggctgaagaaggagcttcgggtcaagctggagctggccaagttcctccaggacaccatcgaggagatggccttgaagaacaaggcagccaagggcagcgccaccaaagacttctctgtgtttttccagaagatccgggaaacaggggagaggcccagcaatgaggaaatcatgcgtttttccaaattatttgaggatgagctgaccctggacaacctgacacggccgcagctggtggccctgtgcaagctgctggagctacagtccatcggcaccaacaacttcctgcgcttccagcttaccatgcggctgcgctccataaaggcagacgacaagctgattgctgaggaaggggtggacagcctgaatgtcaaggagctgcaggcagcgtgtcgggcacgaggcatgcgggccctgggcgtcacggaagaccgcctgaggggtcagctgaagcagtggctggacctgcacctgcatcaggagatccccacatcgctgctcatcctgtcccgggccatgtacctcccggacaccctctctccagccgaccagctcaagtccacactgcagaccctcccagagattgtggcaaaggaagcacaggtgaaagtggccgaggtggagggcgagcaggtggacaacaaggccaagctggaggccacgctgcaggaggaggcggccatccagcaggagcaccgtgagaaggagctgcagaagcgctcggaggtggcgaaggattttgagcccgaacgtgtggtagctgctccccaaaggccggggaccgagccacagccagaaatgcctgacacagtcctgcagtcagagaccttgaaggacactgccccggtgctggagggcttgaaggaggaagagatcacgaaggaggaaatcgacatcctcagcgatgcctgctctaagctgcaggagcagaagaagtcactcaccaaggagaaggaggagctggagctgctgaaggaggatgtgcaggactacagcgaggacttgcaggagatcaagaaggaactttcaaagactggtgaagaaaaatacgtggaagaatctaaagccagcaagagattgacaaaaagggtgcagcaaatgatcgggcagatcgatggcttgatctcgcagctggagatggaccagcaggctggcaagctggccccggccaacggcatgcccacgggggagaacgtcatcagtgtcgctgagctcatcaacgccatgaagcaagtcaagcacattcccgaaagcaagctcaccagcctggccgcagcactggatgaaaacaaggatggcaaggtcaacatcgacgacctcgtcaaggtgattgagctggtggacaaagaagatgttcacatctccaccagccaggtggctgagattgtagcaacactggaaaaagaggagaaggtggaggagaaggagaaggccaaagagaaggcagagaaggaggtcgcagaggtgaagagctagaaccactggcctgggcacctgtcctcctgctgtgccgtcaccctggcaagggccgtgagggcgattgctttgtggtgattctcagtggctcatctaatattttggctggaataaatcagagacttccataatcaagtaaattttaattttcatcattccatggagattcagtctgtctggaatcccggaacccctccacagaatcgtgtctggatccacactgtggtgtggctgccacggcctcctggctccagaggcagctgggccgggccaaggcaggaaggcgcccccatgtgtgtggcctcagtctcagcatctgactgtgctgccctgtccccagggaagagaatgaggaccacgtggactccgcccacacagagctggctgctgtgcccaccctcaggggcgtcaggagacacagcctggcctcctcagggctgaagatgcctccattcgcctgtggaccttgatttctagatttcagtgtcaatagacctgtcttcctgcacactttcagttggatgtgggtcattgtggagacagaggtgtctgccatctctgtggcctctggagagtgacgtctccctgctgggagtgctggttctcacgtgcggtttcccttgtgtatcggagctctttctcggctttctatttcccccagttctttaagcagtcaattggcacagagtttcccacgggggctgcagtggattcactgtgtcagggatgagcctggcttgggggttggtggggctctgaagcgcatttggggttctttgtagcttctaatgtgaggtttgagtccagtgcgcccacagcagcatgcccttctcaccccttgcagtgttgcaggctcaggcccctgggctccttcagcaagcaggctagtcaatgaggcatgaggatccggcacagggcatcccctggggcttcaagggcaatacccccgtgcttagggtttgccctgtgccctctgggtggggtggcctccccgcactcggcagcatggccaggctggccagggcgtgggcaggtggtgtcctgtggcacctccatcctcctgcccagccggctgtgtcacactcatctttttaaggtcaggttggttcctggcaaaaatgtacctccaggggcctccaagcataggatttggaagacaggaacggcacaggcgtccaggaaagcagctgcactcagacaatgccttctccattacttgaagcttctttctgttcagccattaaagaaacttgacaaaataggaacaggagatatttctcaattgtaaacctttgtgcagggacagttggcttccagaggtttcagctttcagttatttgagaagtttgttttagatccttaactaatatttatgaattctctcaccctg

SEQ ID NO: 22856 - DNA, 2146 bp, Homo Sapiens
tgaaatataggtgagagacaagattgtctcatatccggggaaatcataacctatgactaggacgggaagaggaagcactgcctttacttcagtgggaatctcggcctcagcctgcaagccaagtgttcacagtgagaaaagcaagagaataagctaatactcctgtcctgaacaaggcagcggctccttggtaaagctactccttgatcgatcctttgcaccggattgttcaaagtggaccccaggggagaagtcggagcaaagaacttaccaccaagcagtccaagaggcccagaagcaaacctggaggtgagacccaaagaaagctggaaccatgctgactttgtacactgtgaggacacagagtctgttcctggaaagcccagtgtcaacgcagatgaggaagtcggaggtccccaaatctgccgtgtatgtggggacaaggccactggctatcacttcaatgtcatgacatgtgaaggatgcaagggctttttcaggagggccatgaaacgcaacgcccggctgaggtgccccttccggaagggcgcctgcgagatcacccggaagacccggcgacagtgccaggcctgccgcctgcgcaagtgcctggagagcggcatgaagaaggagatgatcatgtccgacgaggccgtggaggagaggcgggccttgatcaagcggaagaaaagtgaacggacagggactcagccactgggagtgcaggggctgacagaggagcagcggatgatgatcagggagctgatggacgctcagatgaaaacctttgacactaccttctcccatttcaagaatttccggctgccaggggtgcttagcagtggctgcgagttgccagagtctctgcaggccccatcgagggaagaagctgccaagtggagccaggtccggaaagatctgtgctctttgaaggtctctctgcagctgcggggggaggatggcagtgtctggaactacaaacccccagccgacagtggcgggaaagagatcttctccctgctgccccacatggctgacatgtcaacctacatgttcaaaggcatcatcagctttgccaaagtcatctcctacttcagggacttgcccatcgaggaccagatctccctgctgaagggggccgctttcgagctgtgtcaactgagattcaacacagtgttcaacgcggagactggaacctgggagtgtggccggctgtcctactgcttggaagacactgcaggtggcttccagcaacttctactggagcccatgctgaaattccactacatgctgaagaagctgcagctgcatgaggaggagtatgtgctgatgcaggccatctccctcttctccccagaccgcccaggtgtgctgcagcaccgcgtggtggaccagctgcaggagcaattcgccattactctgaagtcctacattgaatgcaatcggccccagcctgctcataggttcttgttcctgaagatcatggctatgctcaccgagctccgcagcatcaatgctcagcacacccagcggctgctgcgcatccaggacatacacccctttgctacgcccctcatgcaggagttgttcggcatcacaggtagctgagcggctgcccttgggtgacacctccgagaggcagccagacccagagccctctgagccgccactcccgggccaagacagatggacactgccaagagccgacaatgccctgctggcctgtctccctagggaattcctgctatgacagctggctagcattcctcaggaaggacatgggtgccccccacccccagttcagtctgtagggagtgaagccacagactcttacgtggagagtgcactgacctgtaggtcaggaccatcagagaggcaaggttgccctttccttttaaaaggccctgtggtctggggagaaatccctcagatcccactaaagtgtcaaggtgtggaagggaccaagcgaccaaggataggccatctggggtctatgcccacatacccacgtttgttcgcttcctgagtcttttcattgctacctctaatagtcctgtctcccacttcccactcgttcccctcctcttccgagctgctttgtgggctccaggcctgtactcatcggcaggtgcatgagtatctgtgg

SEQ ID NO: 22857 - DNA, 1746 bp, Homo Sapiens
cgagctgcgattgcagctctggccgcttcctatggttcgggttcagggtccgaatcggactcggacagtgagagcagtcggtgtccgccgccagccgccgactccctcatgcacttgactaaatcgccttcatcaaagccgtctctagcagtggcagtggactcggctccggaggtggcagttaaggaagatttggagactggagttcaccttgaccctgccgtcaaagaagttcagtataatcctacctatgagaccatgtttgctcctgagtttggaccagaaaatccctttaggacacagcaaatggctgcccctagaaatatgctttctggatatgccgaaccagctcatatcaatgatttcatgtttgagcagcaaaggagaacttttgcaacatatggttatgcattagacccttcattagataatcatcaagtgtctgctaaatatattggttctgtagaagaagctgaaaaaaatcaaggtttaactgtatttgaaactggtcagaagaaaacagaaaagaggaaaaagtttaaagaaaatgatgcatccaatattgatggttttttgggaccatgggcaaaatatgtggatgaaaaagatgtagccaaaccttcacgagaagagcaaaaagaattggatgaaatcacagcaaagaggcagaaaaaaggaaaacaggaagaagagaaacctggggaggagaagacaatcttacatgttaaagaaatgtatgactatcaaggcaggtcctatcttcacatacctcaggatgttggtgttaatctacggtcaactatgccacctgagaagtgttatcttcccaaaaaacaaattcatgtgtggtctggacacacaaagggcgtcagtgcagtcagattgtttcctctctctggccatttattgctgtcttgttccatggactgtaaaattaagctatgggaggtttatggagaacggcgctgtctgagaacatttattggtcacagtaaggctgttagggatatctgcttcaatactgcaggaacacagttcctcagtgcagcctatgacaggtatcttaagctctgggacactgagacaggacagtgtatatcaagatttacaaaccgaaaagtaccttattgtgtcaaattcaatcctgatgaagataagcaaaatctctttgtggctgggatgtctgataagaagattgtgcaatgggacattcgaagtggagaaattgtgcaggaatatgatcggcatttgggagctgtcaacaccattgtttttgtggatgagaataggagatttgtgagcacatctgatgataaaagcctaagagtttgggaatgggatatccctgtggatttcaagtacatagcagaacccagtatgcactcaatgcctgcagtgactttgtctccaaatggaaaatggctagcatgccaatcaatggacaaccaaatcttaatttttggagcacagaacagatttagattaaataagaaaaaaatttttaagggccatatggtagcaggctatgcttgtcaggtggacttttcaccagacatgagttatgtgatttcaggagatggaaatggaaaattaaacatttgggactggaagaccacaaaactctacagtcgatttaaagctcatgataaagtgtgtataggtgcagtgtggcatcctcatgaaacttctaaggtcataacatgtggttgggatggtctcattaaattgtgggattaatgagattaa

SEQ ID NO: 22858 - DNA, 1194 bp, Homo Sapiens
ccagcatgcgcctgtcggtgcggagggtgctgctggcagccggctgcgccctggtcctggtgctggcggttcagctgggacagcaggtgctagagtgccgggcggtgctggcgggcctgcggagcccccggggggccatgcggcctgagcaggaggagctggtgatggtgggcaccaaccacgtggaataccgctatggcaaggccatgccgctcatcttcgtgggtggcgtgcctcgcagtggcaccacgttgatgcgcgccatgctggacgcccaccccgaggtgcgctgcggcgaggagacccgcatcatcccgcgcgtgctggccatgcgccaggcctggtccaagtctggccgtgagaagctgcggctggatgaggcgggggtgacggatgaggtgctggacgccgccatgcaggccttcatcctggaggtgattgccaagcacggagagccggcccgcgtgctctgcaacaaggacccatttacgctcaagtcctcggtctacctgtcgcgcctgttccccaactccaagttcctgctgatggtgcgggacggccgggcctccgtgcactccatgatcacgcgcaaagtcaccattgcgggctttgacctcagcagctaccgtgactgcctcaccaagtggaacaaggccatcgaggtgatgtacgcccagtgcatggaggtaggcaaggagaagtgcttgcctgtgtactacgagcagctggtgctgcaccccaggcgctcactcaagctcatcctcgacttcctcggcatcgcctggagcgacgctgtcctccaccatgaagacctcattggcaagcccggtggtgtctccctgtccaagatcgagcggtccacggaccaggtcatcaagcctgttaacctggaagcgctctccaagtggactggccacatccctggggatgtggtgcgggacatggcccagatcgcccccatgctggctcagctcggctatgacccttatgcaaacccccccaactatggcaaccctgaccccttcgtcatcaacaacacacagcgggtcttgaaaggggactataaaacaccagccaatctgaaaggatattttcaggtgaaccagaacagcacctcctcccacttaggaagctcgtgatttccagatctccgcaaatgacttcattgccaagaagagaagaaaatgcatttaa

SEQ ID NO: 22859 - DNA, 4199 bp, Homo Sapiens
tggggcgggctgatgagcacctggattttcacccggcgtgctggtaattcctacacttgtgggtgtttgagagacatgaagaggggaggatgacctcttcccggaagcgggacttccataaaagaagcgtggtgggcgggtcccgggcacctgtggtttggtgagtcctccaggtaactgtgatgcgggggtcagcgggagaggcacccggaagctcccggcgtctgcaccccggcagcgcgaggaaatgcccaaagaaactatagtgacactgaaactgaaggagagatttttaattccttagtgcaatactttggtgacaacttggggcgaaaagttaaagcgatgccattagttgaagaaacttctttattggaagattcgtcagtgacttttcctgtggtaataataggaaatggaccctcaggaatatgcctttcttatatgttatcaggctacagaccgtatttatcatcagaagcaatacacccaaatacaatcttaaatagtaaattagaagaagcaagacatctttccattgttgatcaggacttagaatacttgtctgagggccttgagggccgatcatccaatccagttgcagtacttttcgatacacttcttcatccagatgctgactttgggtatgattatccatccgttttgcattggaaattagagcaacatcattatatccctcacgtagttcttggtaaaggtccacctggtggggcttggcataatatggaaggctccatgttgacaatcagctttggaagttggatggaactacctggacttaaatttaaggactgggtatcaagtaaacgaaggagcctaaaaggggatcgagttatgccagaggaaatagctcgctactataaacattatgtaaaagtcatgggtcttcagaagaatttcagagagaatacttacataacttccgtatcaagactctacagagatcaagatgatgatgatattcaagacagagatatttcaacaaagcatttacagatagagaagtcaaactttatcaagagaaactgggaaattaggggttatcagcgaatagctgatggttctcatgttcccttctgcctctttgctgagaatgtagcgctggcaactggaacgctggattctcctgcccatctggaaattgaaggggaagattttccttttgtgtttcattcaatgcctgaatttggagctgctataaacaaaggaaagttgcgtggcaaagtggatccagtgttaattgtaggttctgggcttactgccgctgacgcagtactgtgtgcttacaacagtaatatccctgtgattcatgtgtttcgcagacgagtaactgatccaagcttaattttcaaacagcttcccaaaaagctgtatcctgaatatcataaagtctatcatatgatgtgtactcagtcatattctgtagactcaaatcttttatctgattataccagctttcccgagcaccgtgtgctttcctttaagtcggacatgaaatgtgttctccaaagcgtttctggattgaagaaaatatttaagctgtctgcagcagtagtattgataggttctcatcctaatctgtcttttctgaaggatcaagggtgttacctaggccataagtcaagccagccaatcacatgtaagggtaatcctgtggaaatagatacatatacctatgagtgtattaaagaagccaacctttttgcattgggtcctttggttggagacaattttgttcgatttttaaagggaggggcgctgggtgttacacgctgtttagctacaagacagaagaaaaagcatttgtttgttgaaagaggaggaggagatgggatagcttaaagcaagtttacaagtaattaaaatggacagtttgccattaaagatttttaatagtggttttgcagtgtactggcttgaattttctggacttgagttaactgaaggagagcctcaaactatagtaacttcatttttaaaagttactagaatttggtatcctgatttatattgcagtgtttcaaaggtgtcactgtcagacaaatagaaacactgccaacttggtgtaacttaagctttcatttaactaaaacattcttttcttgcaaaacttatttttcatgatcatttttggttatttattatacttgattccaaaatagtacagccttgaatctataaaactgtgcagtcattatgccagaaattatcttaaatatataatgggtcaccttgctgttcaaagggtggtgcaaggtcctgcagcatcttacatctgtagcttgttagaaatgtaaactctcaggccccacaacttacttcctgcattttaacaagatccccaagggatatgtatgctcataaaaatttgagacactggtttaaatgaaaatggatataaggtatgtataactgggggtggggtgagggtaggaggcatttacaactcagattttatttattttgaaattatcaattgtataaatctaatttattaccaaatagggtcttttaaaaaatatttttatcgttgaaaccttgacaggtacttcatattcttctaataatttaaacagtccaataatgtggtatacactttgacatccaagaactcaccaagatgtttttcagagatttattctcgatttaactatcatagcatttaatgaatctgatttgtagttcaataaattgtgggttgaactacttatccctgtgtgaacattgaattactttctgtcactgaaactgaggtatttgggtgtggtaagtacttcgaaaattgtaatactgtttgggcattgtctaaattattaaaggttaaaatagaaaataaagtcagaatttttcttttccattccaaaggtgtacttagagatctctattagtattcattcgagatgacatagcagctcatatcatggttgtttattggatttatctgttctaattatataagtgtgtttactgtctgtgttttcacacaaactgctagaatttttaatgttaagacgaaaacatctgaagttctccatggcaaattgaatttttcagtcattttcttttctttttttggtacaattacttcatctggaatgtcttcattgaactcgttattctatttttcttagaattaaaagtggattaatgtgggtttttctgttcattttattgcagtattaaatgcttaagcttattaggaccataattcactttaaatataattgtatagaatatatttgcgtcgatcaaataattgcttcagatgaattcttagactcttgataatatcacacctaatttaacttgattttacaagctgtacaatccagttttagttttctattgtgataataacttttttcaaaccagtttcacatcttaatgaaataacattctctgactgcacttgcttcagtactctcttgcctgcctgtttttgacctctgcatgagttggattagatgtttttcttactgtcacttctaaatagaaaatgacagtgttataaaaaagggaaggataaaacctttgacatccccttgtgtctcaaaagtccacagttattcaaacaatggctttttttgtgatgagagtatttgttaaaaaaaaaaaaagacttcaagaaaaataaaagttcagtggagctgcaaataaatctggtgaataatttcatctttggtaatctcccatttcctgagttcttcctcaatccaagctgtcctgtgtagtatataacatttgggcattttctctgatatactatactctcatgttctataaatttctgtcccgtaattctaacactttacattttttctttgctatcagctatagctattcatggaagggaagaatcactaaatacttgtctagttatagcatgatgtgagcatctcctccttatccctcgatgcctggcttggtgtctggcaaacagtccataattagcagatgttgaaagaccgtttacaaagcagaatttggggatttaaagtgcaatgatacaacaaaaagatttaattacagcttccagtgttttgactatgtgaaccatatccaactacttttttgaaaatctagttctatgtaatatatttctgtggcatcaaattttagttgattgtattagtcaataggaagtggtggaaaatttctaaataaattcaactattaaa

SEQ ID NO: 22860 - DNA, 2201 bp, Homo Sapiens
cgtgagagggccttcgcggtggaacaaacactcgcttagcagcggaagactccgagttctcggtactcttcagggatgagtcatgtggcagtggaaaatgcgctcgggctggaccagcagtttgctggcctagacctgaactcttcagataatcagagtggaggaagtacagccagcaaagggcgctatattcctcctcatttaaggaaccgagaagctactaaaggtttctacgataaagacagttcagggtggagttctagcaaagataaggatgcgtatagcagttttggatctcgtagtgattcaagagggaagtctagcttcttcagtgatcgtggaagtggatcaaggggaaggtttgatgatcgtggacggagtgattacgatggcattggcagccgtggtgacagaagtggctttggcaaatttgaacgtggtggaaacagtcgctggtgtgacaaatcagatgaagatgattggtcaaaaccactcccaccaagtgaacgcttggaacaggaactcttttctggaggcaacactgggattaattttgagaaatacgatgacattccagttgaggcaacaggcaacaactgtcctccacatattgaaagtttcagtgatgttgagatgggagaaattatcatgggaaacattgagcttactcgttatactcgcccaactccagtgcaaaagcatgctattcctattatcaaagagaaaagagacttgatggcttgtgcccaaacagggtctggaaaaactgcagcatttctgttgcccatcttgagtcagatttattcagatggtccaggcgaggctttgagggccatgaaggaaaatggaaggtatgggcgccgcaaacaatacccaatctccttggtattagcaccaacgagagagttggcagtacagatctacgaggaagccagaaaattttcataccgatctagagttcgtccttgcgtggtttatggtggtgccgatattggtcagcagattcgagacttggaacgtggatgccatttgttagtagccactccaggacgtctagtggatatgatggaaagaggaaagattggattagacttttgcaaatacttggtgttagatgaagctgatcggatgttggatatggggtttgagcctcagattcgtagaatagtcgaacaagatactatgcctccaaagggtgtccgccacactatgatgtttagtgctacttttcctaaggaaatacagatgctggctcgtgatttcttagatgaatatatcttcttggctgtaggaagagttggctctacctctgaaaacatcacacagaaagtagtttgggtggaagaatcagacaaacggtcatttctgcttgacctcctaaatgcaacaggcaaggattcactgaccttagtgtttgtggagaccaaaaagggtgcagattctctggaggatttcttataccatgaaggatacgcatgtaccagcatccatggagaccgttctcagagggatagagaagaggcccttcaccagttccgctcaggaaaaagcccaattttagtggctacagcagtagcagcaagaggactggacatttcaaatgtgaaacatgttatcaattttgacttgccaagtgatattgaagaatatgtacatcgtattggtcgtacgggacgtgtaggaaaccttggcctggcaacctcattctttaacgagaggaacataaatattactaaggatttgttggatcttcttgttgaagctaaacaagaagtgccgtcttggttagaaaacatggcttatgaacaccactacaagggtagcagtcgtggacgttctaagagtagcagatttagtggagggtttggtgccagagactaccgacaaagtagcggtgccagcagttccagcttcagcagcagccgcgcaagcagcagccgcagtggcggaggtggccacggtagcagcagaggatttggtggaggtggctatggaggcttttacaacagtgatggatatggaggaaattataactcccagggggttgactggtggggtaactgagcctgctttgcagtaggtcaccctgccaaacaagctaatatggaaaccacatgtaacttagccagactataccttgtgtagcttcaagaactcgcagtacattaccagctgtgattctccactgaaatttttttttt

SEQ ID NO: 22861 - DNA, 1638 bp, Homo Sapiens
gggctgcgtgcggcgggaatcatggctgctcgcagagctctgcacttcgtattcaaagtgggaaaccgcttccagacggcgcgtttctatcgggacgtcctggggatgaaggttctgcggcatgaggaatttgaagaaggctgcaaagctgcctgtaatgggccttatgatgggaaatggagtaaaacaatggtgggatttgggcctgaggatgatcattttgtcgcagaactgacttacaattatggcgtcggagactacaagcttggcaatgactttatgggaatcacgctcgcttctagccaggctgtcagcaacgccaggaagctggagtggccactgacggaagttgcagaaggtgtttttgaaaccgaggccccgggaggatataagttctatttgcagaatcgcagtctgcctcagtcagatcctgtattaaaagtaactctagcagtgtctgatcttcaaaagtccttgaactactggtgtaatctactgggaatgaaaatttatgaaaaagatgaagaaaagcaaagggctttgctgggctatgctgataaccagtgtaagctggagctacagggcgtcaagggtggggtggaccatgcagcagcttttggaagaattgccttctcttgcccccagaaagagttgccagacttagaagacttgatgaaaagggagaaccagaagattctgactcccctggtgagcctggacaccccagggaaagcaacagtacaggtggtcattctggccgaccctgacggacatgaaatttgctttgtcggggatgaagcatttcgagaactttctaagatggatccagagggaagcaaattgttggatgatgcaatggcagcagataaaagtgacgagtggtttgccaaacacaataaacccaaagcttcaggttaacggaagacatgatgcagagcaagcctctgtgattcctgcccagcacctgtgaggcctgacgtgtcagttcccaataaatgctcttctgatttgtttcccgtacaggcaaggaggcttgggtagtgcagatttgtgtatttcaatctttgaaagctctgatgtaatttagaaatgaaatccaatcatgagtccaggtagagaacgcctgctgtaatctacactgttgctgggactgcgcattctgtatataactgtgttggatgagtgacagatgattgtccagactaggacagcggcatgaacatgactttggttgggattgcggatagttagggttacctctgaatcgtgtagcttttatgagagcagctgtgcaagtgaatccacattaatgccttgtcgtggtgccattcccagcgcctgacgatacgctcttctattgtcttattctggcaggttttgacgttttaaattttttaaagaaattttattccttggaccaaaaggtttggttaaccacccccctcttacttgctttcacattttgagtgtccagaggaaacagaaaggaatgagtgtgtgacgttgctgcacgcctgactctgtgcgagcttctttctgtgtatatattttgttttatttttttccgtgtatatttttaatcccgacagaacatcatgtgagatttctttaaaatggattaaacgatttcttcagccg

SEQ ID NO: 22862 - DNA, 1588 bp, Homo Sapiens
ccctccttggcaccatgaccacctgcagccgccagttcacctcctccagctccatgaagggctcctgcggcatcggaggcggcatcgggggcggctccagccgcatctcctccgtcctggccggagggtcctgccgtgcccccagcacctacgggggcggcctgtctgtctcctctcgcttctcctctgggggagcctgcgggctggggggcggctatggcggtggcttcagcagcagcagcagctttggtagtggcttcgggggaggatatggtggtggccttggtgctggcttcggtggtggcttgggtgctggctttggtggtggttttgctggtggtgatgggcttctggtgggcagtgagaaggtgaccatgcagaacctcaatgaccgcctggcctcctacctggacaaggtgcgtgctctggaggaggccaacgccgacctggaagtgaagatccgtgactggtaccagaggcagcggcccagtgagatcaaagactacagtccctacttcaagaccatcgaggacctgaggaacaagatcattgcggccaccattgagaatgcgcagcccattttgcagattgacaatgccaggctggcagccgatgacttcaggaccaagtatgagcacgaactggccctgcggcagactgtggaggccgacgtcaatggcctgcgccgggtgttggatgagctgaccctggccaggactgacctggagatgcagatcgaaggcctgaaggaggagctggcctacctgaggaagaaccacgaggaggagatgcttgctctgagaggtcagaccggcggagatgtgaacgtggagatggatgctgcacctggcgtggacctgagccgcatcctgaatgagatgcgtgaccagtacgagcagatggcagagaaaaaccgcagagacgctgagacctggttcctgagcaagaccgaggagctgaacaaagaagtggcctccaacagcgaactggtacagagcagccgcagtgaggtgacggagctccggagggtgctccagggcctggagattgagctgcagtcccagctcagcatgaaagcatccctggagaacagcctggaggagaccaaaggccgctactgcatgcagctgtcccagatccagggactgattggcagtgtggaggagcagctggcccagctacgctgtgagatggagcagcagagccaggagtaccagatcttgctggatgtgaagacgcggctggagcaggagattgccacctaccgccgcctgctggagggcgaggatgcccacctttcctcccagcaagcatctggccaatcctattcttcccgcgaggtcttcacctcctcctcgtcctcttcgagccgtcagacccggcccatcctcaaggagcagagctcatccagcttcagccagggccagagctcctagaactgagctgcctctaccacagcctcctgcccaccagctggcctcacctcctgaaggcccgggtcaggaccctgctctcctggcgcagttcccagctatctcccctgctcctctgctggtggtgggctaataaagctgactttctggttgat

SEQ ID NO: 22863 - DNA, 4971 bp, Homo Sapiens
aattcggcacgagctgagacggagaagaggagaggcagagagggcgcggggaccgtcagcagcaccttagctacaatcgttcagctattctcggaagagagaagggagagggaggaggccggggcgggagtgggggctgtcaccctcggaccccggcgtgagaggggccgtgcggccggacgtcctcggggtgggcccccagtcggtggccgaagacctacagctcaggcccctgggtcccaaatttccaggctttgcccctcctcctttctcagatacccgggtaacagtcctcatagtccagatatccgggactcgggtcccaacctctctaaacctgggtctctgtttcatagattttcaaatatcaggttcaggcccctgcgtgcaccagtatccggggttcattccccgggcgtttcaaatatcggattcagtctccatcccgttcagatattcggggttcagaccccacaatcagaaatccggaattcggcagctgtcgccctcgacgagggggaggactggaccgcgaggtcagattaggttgtcaccccctcccctccaggggaggcttcccgggcccgcccctcaggaagggcgaaagccgaggaagaggtggcaaggggaaaggtctccttgcccctctccctgcttggcagagccgctggaggaccccaggcggaagcggaggcgctggggcaccatagtgacccctaccaggccaggccccactctcagggcccccaggggccaccatgccagctgggggccgggccgggagcctgaaggacccagatgtggctgagctcttcttcaaggatgacccagaaaagctcttctctgacctccgggaaattggccatggcagctttggagccgtatactttgcccgggatgtccggaatagtgaggtggtggccatcaagaagatgtcctacagtgggaagcagtccaatgagaaatggcaagacatcatcaaggaggtgcggttcttacagaagctccggcatcccaacaccattcagtaccggggctgttacctgagggagcacacggcttggctggtaatggagtattgcctgggctcagcttctgaccttctagaagtgcacaagaaaccccttcaggaggtagagatcgcagctgtgacccacggggcgcttcagggcctggcatatctgcactcccacaacatgatccatagggatgtgaaggctggaaacatcctgctgtcagagccagggttagtgaagctaggggactttggttctgcgtccatcatggcacctgccaactccttcgtgggcaccccatactggatggcacccgaggtgatcctggccatggatgaggggcagtacgatggcaaagtggacgtctggtccttggggataacctgcatcgagctggctgaacggaaaccaccgctctttaacatgaatgcgatgagtgccttataccacattgcacagaacgaatcccccgtgctccagtcaggacactggtctgagtacttccggaattttgtcgactcctgtcttcagaaaatccctcaagacagaccaacctcagaggttctcctgaagcaccgctttgtgctccgggagcggccacccacagtcatcatggacctgatccagaggaccaaggatgccgtgcgggagctggacaacctgcagtaccgcaagatgaagaagatcctgttccaagaggcacccaacggccctggtgccgaggccccagaggaggaagaggaggccgagccctacatgcaccgggccgggactctgaccagcctcgagagtagccactcagtgcccagcatgtccatcagcgcctccagccagagcagctccgtcaacagcctagcagatgcctcagacaacgaggaagaggaggaggaggaggaggaagaggaggaggaggaagaaggccctgaagcccgggagatggccatgatgcaggagggggagcacacagtcacctctcacagctccattatccaccggctgccgggctctgacaacctatatgatgacccctaccagccagagataacccccagccctctccagccgcctgcagccccagctcccacttccaccacctcttccgcccgccgccgggcctactgccgtaaccgagaccactttgccaccatccgaaccgcctccctggtcagccgtcagatccaggagcatgagcaggactctgcgctgcgggagcagctgagcggctataagcggatgcgacgacagcaccagaagcagctgctggccctggagtcacggctgaggggtgaacgggaggagcacagtgcacggctgcagcgggagcttgaggcgcagcgggctggctttggggcagaggcagaaaagctggcccggcggcaccaggccataggtgagaaggaggcacgagctgcccaggccgaggagcggaagttccagcagcacatccttgggcagcagaagaaggagctggctgccctgctggaggcacagaagcggacctacaaacttcgcaaggaacagctgaaggaggagctccaggagaaccccagcactcccaagcgggagaaggccgagtggctgctgcggcagaaggagcagctccagcagtgccaggcggaggaggaagcagggctgctgcggcggcagcgccagtactttgagctgcagtgtcgccagtacaagcgcaagatgttgctggctcggcacagcctggaccaggacctgctgcgggaggacctgaacaagaagcagacccagaaggacttggagtgtgcactgctgcttcggcagcacgaggccacgcgggagctggagctgcggcagctccaggccgtgcagcgcacgcgggctgagctcacccgcctgcagcaccagacggagctgggcaaccagctggagtacaacaagcggcgtgagcaagagttgcggcagaagcatgcggcccaggttcgccagcagcccaagagcctcaaagtacgtgcaggccagcgccccccgggccttccactccccattcctggggctctgggcccacccaacacaggcacccctatagaacagcagccctgctcacctggccaggaggcagtcctggaccaaagaatgcttggcgaggaggaggaagcagttggagagagaaggattctgggaaaggaaggggccactttggagcccaagcagcagaggattctgggggaagaatcaggagcccctagtcccagtccacaaaaacatgggagcctggttgatgaggaagtttggggtctgcctgaggagatagaggagcttagggtgccctcccttgtaccccaggagaggagcattgttggccaggaggaggctgggacgtggagcttgtgggggaaggaggatgagagtcttctggatgaggagtttgagcttggctgggtccagggcccagcactgactcccgtccctgaggaggaggaagaagaggaagagggggctccgattgggacccctagggatcctggagatggttgtccttcccccgacatccctcctgaaccccctccaacacacctgaggccctgccctgccagccagctccctggactcctgtcccatggcctcctggccggcctctcctttgcagtggggtcctcctctggcctcctgcccctcctgctgctgctgctgcttccattgctggcagcccagggtgggggtggcctgcaggcagcgctgctggcccttgaggtggggctggtgggtctgggggcctcctacctgctcctttgtacagccctgcacctgccctccagtcttttcctactcctggcccagggtaccgcactgggggccgtcctgggcctgagctggcgccgaggcctcatgggtgttcccctgggccttggagctgcctggctcttagcttggccaggcctagctctacctctggtggctatggcagcggggggcagatgggtgcggcagcagggcccccgggtgcgccggggcatatctcgactctggttgcgggttctgctgcgcctgtcacccatggccttccgggccctgcagggctgtggggctgtgggggaccggggtctgtttgcactgtaccccaaaaccaacaaggatggcttccgcagccgcctgcccgtccctgggccccggcggcgtaatccccgcaccacccaacacccattagctctgttggcaagggtctgggtcctgtgcaagggctggaactggcgtctggcacgggccagccagggtttagcatcccacttgcccccgtgggccatccacacactggccagctggggcctgcttcggggtgaacggcccacccgaatcccccggctactaccacgcagccagcgccagctagggccccctgcctcccaccagccactgccagggactctagccgggcggaggtcacgcacccgccagtcccgggccctgcccccctggaggtagctgactccagcccttccagcccaaatctagagcattgagcactttatctcccacgactcagtgaagtttctccagtccctagtcctctcttttcacccaccttcctcagtttgctcacttaccccaggcccagcccttcggacctctagacaggcagcctcctcagctgtggagtccagcagtcactctgtgttctcctggcgctcctcccctaagttattgctgttcgcccgctgtgtgtgctcatcctcaccctcattgactcaggcctggggccaggggtggtggagggtgggaagagtcatgttttttttctcctctttgattttgtttttctgtctcccttccaacctgtccccttccccccaccaaaaaaagaaaaagacaaacacaaataaaatatctgagcggaactgtgaaaaaaaaaaaaaaaaaaaaaaaaaaaaaaaaaaaaaaaaaaaaaaaaaaaaaaaaaaaaaaaaaaaaaaaaaaaaaaaaaaaaaaa

SEQ ID NO: 22864 - DNA, 1222 bp, Homo Sapiens
ggcgggccagcggcggagccgtgtagcggagaagctccccctccctgcttcccttggccgagccgggggcgcgcgcgcacgcggccgtccagagcgggctccccacccctcgactcctgcgacccgcaccgcacccccacccgggcccggaggatgatgaagctcaagtcgaaccagacccgcacctacgacggcgacggctacaagaagcgggccgcatgcctgtgtttccgcagcgagagcgaggaggaggtgctactcgtgagcagtagtcgccatccagacagatggattgtccctggaggaggcatggagcccgaggaggagccaagtgtggcagcagttcgtgaagtctgtgaggaggctggagtaaaagggacattgggaagattagttggaatttttgagaaccaggagaggaagcacaggacgtatgtctatgtgctcattgtcactgaagtgctggaagactgggaagattcagttaacattggaaggaagagggaatggtttaaaatagaagacgccataaaagtgctgcagtatcacaaacccgtgcaggcatcatattttgaaacattgaggcaaggctactcagccaacaatggcaccccagtcgtggccaccacatactcggtttctgctcagagctcgatgtcaggcatcagatgactgaagacttcctgtaagagaaatggaaattggaaactagactgaagtgcaaatcttccctctcaccctggctctttccacttctcacaggcctcctctttcaaataaggcatggtgggcagcaaagaaagggtgtattgataatgttgctgtttggtgttaagtgatggggctttttcttctgtttttattgagggtgggggttgggtgtgtaatttgtaagtacttttgtgcatgatctgtccctccctcttcccacccctgcagtcctctgaagagaggccaacagccttcccctgccttggattctgaagtgttcctgtttgtcttatcctggccctggccagacgttttctttgatttttaattttttttttttattaaaagataccagtatgagatgaaaacttccaataatttgtcctataatgtgctgtacagttcagtagagtggtcactttcactgcagtatacatttatctacacattatatatcggacatataatatgtaaataaatgacttctagaaagaaaaaaaaaaaaaaaaaa

SEQ ID NO: 22865 - DNA, 1356 bp, Homo Sapiens
gaggagtggcagcacctggaccctagtcagagggctctgtatagagatgtgatgctggagaactacagcaaccttgtctcagtggggtattgtgttcacaaaccagaggtgattttcaggctgcaacaaggagaagagccatggaaacaggaggaagaattcccaagccaaagctttccagagatggggtttcaccatgttcctgtggctggtcttaaactcctgagttcaagtgatccacctgccttggcctcccaaagtggtaggattacaggcatgagccacagcatcccacctgtaatggggagttttaaatttacaacttcaatcttttttacttgtgtaggtcttttcagatttttctttttctacttgagttggttttagttgtttatgttttatggattttcccattttgttgaagttaaataatttgttggcatacattgttcataccattctttgtaattatttttatttctgtaagagtactagtaatacatctttaatccctacttttagtaatttgaaccttctctctcttttttttctttttcaatgtcagtctagctagaggtttgtatattttgttgatcttttccaggaatcagctattgtttttctgttctctagctcattaatttttactctataatctttctgctttcctgccttctgcttgatttggttttgtattgctgctcctgtccaagtgttttaaggtggaaaattagtttactgatttgagatctttttaaatatggttattacagctacaaatctctaaggattgctttatctgtgttccataagtttgagtatgtcttcatttttatctcaaagcatttttttctaattttccttcttattgcttctttaactttttttttttaactccggaatatgttatataatttgtgcatgtttgtgcattctaaaaattcctttgtcttactgatttgtaattcgactgtggtcagagaatcattttaaatttattctggggaatgtttcatgtgtacttttgaagcatacctgctccactgttcgagtggaatgttctgtctatatctcttagatctggttgctttagagtgtcatctatatcttctgtttccatgtttatattgtgcccagttgtcctaaccattattgaaaatggggtattacagtttgcaataagtattgtagacttgtatatttttttcttttaattctgtcagtttttgctacacatactttgaggctctgttagtagtacatacgcttagaattgttatgtctcctttattgattgacccttttattgttatattaataaaattcccctctttatccttagtaaaaaaaaaaaaa

SEQ ID NO: 22866 - DNA, 1453 bp, Homo Sapiens
ggctgttggcggcggttggctcggcgcgggagtcggctgcacgtgcgggcgggggcgatgcgtcactgatcggaggaacgagaatgaatatgactcaagcccgggttctggtggctgcagtggtggggttggtggctgtcctgctctacgcctccatccacaagattgaggagggccatctggctgtgtactacaggggaggagctttactaactagccccagtggaccaggctatcatatcatgttgcctttcattactacgttcagatctgtgcagacaacactacaaactgatgaagttaaaaatgtgccttgtggaacaagtggtggggtcatgatctatattgaccgaatagaagtggttaatatgttggctccttatgcagtgtttgatatcgtgaggaactatactgcagattatgacaagaccttaatcttcaataaaatccaccatgagctgaaccagttctgcagtgcccacacacttcaggaagtttacattgaattgtttgatcaaatagatgaaaacctgaagcaagctctgcagaaagacttaaacctcatggccccaggtctcactatacaggctgtgcgtgttacaaaacccaaaatcccagaagccataagaagaaattttgagttaatggaggctgagaagacaaaactccttatagctgcacagaaacaaaaggttgtggaaaaagaagctgagacagagaggaaaaaggcagttatagaagcagagaagattgcacaagtggcaaaaattcggtttcagcagaaagtgatggaaaaagaaactgaaaagcgcatttctgaaatcgaagatgctgcattcctggcccgagagaaagcgaaagcagatgctgaatattatgctgcacacaaatatgccacctcaaacaagcacaagttgaccccggaatatctggagctcaaaaagtaccaggccattgcttctaacagtaagatctattttggcagcaacatccctaacatgttcgtggactcctcatgtgctttgaaatattcagatattaggactggaagagaaagctcactcccctctaaggaggctcttgaaccctctggagagaacgtcatccaaaacaaagagagcacaggttgatgcaagaggtggaaatgttctccatatcaagatgtggcccaaggggttaagtgggaacaatcattatacggactcttcagatttacagagaacttacacttcatctgttccacctctcctgcgatagtcctgggtgctccactgattggaggatagagccagctgtctgacacacaaatggtcttttcagccacagtcttatcaagtatcctatatgtattcctttctaaactgctactcatgaatgaggaaagtctgatgctaagatactgcctgcactggaatgttaaacactaaatatataacaagctgtgttttcgtaa

SEQ ID NO: 22867 - DNA, 4624 bp, Homo Sapiens
cacggaacagccctcctggggtccccacgagccgcgtcctgctgtgccccggcgcctacgcagcagcggccgcggccgcggtgggcacgcacggttaccccgggcagctccggccgccagctgcagccccgtcgcctcggccgcgccagccggctgcgggcacctgggggcgggctgggggcgccggccgcggcaggaggcgctgtagcgagggctgcggcgccggtcctgcggcggccgcgggaggcagcggggcaggcgctgtgggccgggctcctcctccggctcctgcgcgaccgcctcccgccgggctctgccggcgcccgccgtccccgcagcgccgctctgcgcccgccgccccgagcgcccgcgcggggctggcgggagcctcggcgggcgcgcgggcgcgcggggccatggtcgtggccccctgacgggccgcggccgcctccatgaagcggaaaagcgagcggcggtcgagctgggccgccgcgcccccctgctcgcggcgctgctcgtcgacctcgccgggtgtgaagaagatccgcagctccacgcagcaagacccgcgccgccgggacccccaggacgacgtgtacctggacatcaccgatcgcctttgttttgccattctctacagcagaccaaagagtgcatcaaatgtacattatttcagcatagataatgaacttgaatatgagaacttctacgcagattttggaccactcaatctggcaatggtttacagatattgttgcaagatcaataagaaattaaagtccattacaatgttaaggaagaaaattgttcattttactggctctgatcagagaaaacaagcaaatgctgccttccttgttggatgctacatggttatatatttggggagaaccccagaagaagcatatagaatattaatctttggagagacatcctatattcctttcagagatgctgcctatggaagttgcaatttctacattacacttcttgactgttttcatgcagtaaagaaggcaatgcagtatggcttccttaatttcaactcatttaaccttgatgaatatgaacactatgaaaaagcagaaaatggagatttaaattggataataccagaccgatttattgccttctgtggacctcattcaagagccagacttgaaagtggttaccaccaacattctcctgagacttatattcaatattttaagaatcacaatgttactaccattattcgtctgaataaaaggatgtatgatgccaaacgctttacggatgctggcttcgatcaccatgatcttttctttgcggatggcagcacccctactgatgccattgtcaaagaattcctagatatctgtgaaaatgctgagggtgccattgcagtacattgcaaagctggccttggtcgcacgggcactctgatagcctgctacatcatgaagcattacaggatgacagcagccgagaccattgcgtgggtcaggatctgcagacctggctcggtgattgggcctcagcagcagtttttggtgatgaagcaaaccaacctctggctggaaggggactattttcgtcagaagttaaaggggcaggagaatggacaacacagagcagccttctccaaacttctctctggcgttgatgacatttccataaatggggtcgagaatcaagatcagcaagaacccgaaccgtacagtgatgatgacgaaatcaatggagtgacacaaggtgatagacttcgggccttgaaaagcagaagacaatccaaaacaaacgctattcctctcacagtaattcttcaatccagtgttcagagctgtaaaacatctgaacctaacatttctggcagtgcaggcattactaaaagaaccaccagatctgcttcaaggaaaagcagtgttaaaagtctctccatttcaaggactaaaacagtcttgcgttaagtaaaaacctgtgaccagagctgaaggaagactctaggactgaaaactgcaacagaaattagcacaatttgaaaacaaaacaaaattgcaaaagccttagttgctttttccacctaagaagttgatcaatggagaaaatgtccactggagtttgaataatgaactttgagtttgggtgcaagcaaatgactcagagaagggtccagctctcaagctgaatgacaaacatgctgttgtaaatttagtctcaggtgtaaatacccaagccctctggtacccagggagctggctggtctgtggtgcatgtgtgtccctgtgatggcaatcattgtagttgctggccttcagaagaattgaggatctgatggagtttttttatgtatttattttctgttcaccttgtgaccctgtgtcaaaatttataaagatacaaaaggcattactgaaatggtactttctgtaatttgatactatttggcttaatcatcttcacttgactatttgtaatactgttgtaatgttaactctgttaagtacccaagctgcttgtcttccaccaaagagtgctttattaacaagaatctgtgaaaatcacatttaaacactgttgcatgttgtaagaccaggtggtaccttagtaacctaaaacttgcaagagaatattaatggtagctttagaagactcaggaggagaaactgacttcagagttggaagatgttgcaagtcgttcctttttctgtccttcagggactgaagaactgggaggctgcccattgtttggttgccagtcatacaaattaaaatcatatttccttccatgaatggaagaaacacactattggtttttccccttggaaacagcaatcccaaataatgtcggcttacaaaaaaaaaaagttaccacttttttagagtccttccctgtaacattggattttttttttcccttatgagatccacctaaggccattgacgtggcctgcgatctcagtgacaatgatctgcttctggatctcactgttgcctttggttagggaacacaactagtaactctgcagagtgccttctcccgcagccctactggaacacagcagagtctgtgccatgaagcagttacagaaacagaattgatgtgctgccaaaaaaaaaaaaaaaatggggcccgaaataaaagaatatatagtactcacctcagttccttccataagaagtgggtggtttaatgattgttaagccatttttgcctgtgccgggagcatggagggctgagatgtcgacaggcagtgggaaacaaatgccctcctaagccacaaggcgtgcgccagattagtaggcaactccattttaagaagctgcctttttcacaaaactggaagaaataaaagcggttggaataaacaagttaaaagtctttaatgcaaaaagtaattgaaaggcagtgcctccattttggtgtactttcttggaagaaagtataaaattgaccggcatcatgagagacggaagatgccgtgttctcagccaaacaagcaactctttccccgccaggcactgtcgggtggggtcaggccagcttttaaacactggggactggatcacagaaaaacagtggttttctgtccctggaaatgaataggcacaaagacccacttggctgtgggcagactactcttcaataagatttgggtgggaggaggaacattccttttgctattttgagctgagacaatataaatattcaaactgtgccatgcataaagcattgaattctcagggcacctcttcttccccttaccccttttaaggccatcccctccattaataataatccaggtagttgtgaaaatcgtgcttctatctgatcccttcttagtttggcttttcatcccatcagaacaagtaaacgtaggcgccacagctcttgtgagtactgtctccctcacggtgaatgagcctcctggtgtttcgtccaagaaaagaaagggtgtcactggaaccacagccctttttcattttataaactgcctcttcatgttgcctgctcaagtttccacctagaattgctatcactgtggctctttctaaaaatctttctatttaactggttcactgaaattagtcatagaaaacttgtgatttggtgaagaggcattccttgtaataaccaaatgacttgggatggtgtgcatagcaagggcagtgttacacttatgaggactgtctctagcatccaggaagtctctgggtctgagggatggaaagttcttcctgctatgaatgagagtggactcttcccctcacccccaactgaaaccacaaacaaccagaatcttctggaattctgacttagagtcgttgttatagaagaccttgttgctatggaacatgaaactgtgtgtcagatggagagatccccttaacctaagagccttaaatagccctgaaagtacactgggacggtttgcgatggaattaaaattggaagtgaatatttttaggtgctcttgaagctttctggggactcaaaattatcaaaagtcagggacagtccggaggaagagcgtctgcaaaactgggttcctagaagtatagacggacttagctttttgtagaatttggtgaggagcagcgcctcgtgagagcagaatggcctggcgtggccagtgcttcccgg

SEQ ID NO: 22868 - DNA, 4960 bp, Homo Sapiens
cacggaacagccctcctggggtccccacgagccgcgtcctgctgtgccccggcgcctacgcagcagcggccgcggccgcggtgggcacgcacggttaccccgggcagctccggccgccagctgcagccccgtcgcctcggccgcgccagccggctgcgggcacctgggggcgggctgggggcgccggccgcggcaggaggcgctgtagcgagggctgcggcgccggtcctgcggcggccgcgggaggcagcggggcaggcgctgtgggccgggctcctcctccggctcctgcgcgaccgcctcccgccgggctctgccggcgcccgccgtccccgcagcgccgctctgcgcccgccgccccgagcgcccgcgcggggctggcgggagcctcggcgggcgcgcgggcgcgcggggccatggtcgtggccccctgacgggccgcggccgcctccatgaagcggaaaagcgagcggcggtcgagctgggccgccgcgcccccctgctcgcggcgctgctcgtcgacctcgccgggtgtgaagaagatccgcagctccacgcagcaagacccgcgccgccgggacccccaggacgacgtgtacctggacatcaccgatcgcctttgttttgccattctctacagcagaccaaagagtgcatcaaatgtacattatttcagcatagataatgaacttgaatatgagaacttctacgcagattttggaccactcaatctggcaatggtttacagatattgttgcaagatcaataagaaattaaagtccattacaatgttaaggaagaaaattgttcattttactggctctgatcagagaaaacaagcaaatgctgccttccttgttggatgctacatggttatatatttggggagaaccccagaagaagcatatagaatattaatctttggagagacatcctatattcctttcagagatgctgcctatggaagttgcaatttctacattacacttcttgactgttttcatgcagtaaagaaggcaatgcagtatggcttccttaatttcaactcatttaaccttgatgaatatgaacactatgaaaaagcagaaaatggagatttaaattggataataccagaccgatttattgccttctgtggacctcattcaagagccagacttgaaagtggttaccaccaacattctcctgagacttatattcaatattttaagaatcacaatgttactaccattattcgtctgaataaaaggatgtatgatgccaaacgctttacggatgctggcttcgatcaccatgatcttttctttgcggatggcagcacccctactgatgccattgtcaaagaattcctagatatctgtgaaaatgctgagggtgccattgcagtacattgcaaagctggccttggtcgcacgggcactctgatagcctgctacatcatgaagcattacaggatgacagcagccgagaccattgcgtgggtcaggatctgcagacctggctcggtgattgggcctcagcagcagtttttggtgatgaagcaaaccaacctctggctggaaggggactattttcgtcagaagttaaaggggcaggagaatggacaacacagagcagccttctccaaacttctctctggcgttgatgacatttccataaatggggtcgagaatcaagatcagcaagaacccgaaccgtacagtgatgatgacgaaatcaatggagtgacacaaggtgatagacttcgggccttgaaaagcagaagacaatccaaaacaaacgctattcctctcaccgatggttggctgtcccaggctgtcacctttctagaccggcttctgatctggctcgggatccacaaggactagacctgcggggaaggtctctcctggacacgcccgttgcccactgcaagttctctccaggtgcaattgaagcctctcagcagcggaggccgccatgtggagagagcaggcaggcccactgctgctgagaacagggcaggcacgggcagctcctgttctgcctttcccagcttcggagacgcaggctcagctgctccgaagcacctgccagcaccgcacagtacagtttcagaggacagcagtctccttcccgtgaagctcccatgtgctggaatggcatggacttgctgatcaacagaaggaaatggtctgaagtctgaccagcacaaggaaggaggctggctggctcagaggggcccaccttgcgtggaatgaaaacgccaaaggctcatgagcaacattaggctagaggggtcttgttcaaagcatccaactctgacttcggaggcattcccagccggcagcagtgtgtccagcctgcctcttcccaggctggtctgacatgcagcttaggctttcatcccaagttaggtactgacccctccctcttgggcagcacctccctttttaaaaaaatttttttttcttccaaagacagagtcttgctcttgttgtccaggctggagtgcagtggcgcgatctaggctcactgcaacctccttctcccaggttcaagcgactctcctgcctcagcctcctgagtagctgggattataggcgtctgccaccacgcccggctaatttctgtatttttagtagagacagggtttcaccatgttggccaggctggtctcgaactcctgacctcaagtgatctgcctgccttggcctcccaaagtgctgggattacaggtgtcagccaccgcacccagccaagcacccctatctctagaggatctggccccccagcccagttactgcagggcagctttccccacctggtgacaggctgtgcgcagcagccccaggacctcaccctgagctgagtcttcaggagccgccctggtggcacaactcagacacccctgaggcctagcagtcaactcctgattcagacatgatccagtccagcctgggcttggctataaccagctcaaacttgcttgacctccacttttcaggagacttggggacgacagccctcatcggcgtctttcatggggttaatctgcttgagtctaagtcgccagccagaaacgtggtgcccagggtgccctgcctcaggacatgtccacacccacgtcacaagcacctgaggagtccggccggggcactgtggtccaaaaggtcctgccgcctccgcatctgactgtcccaacggcatgctggtgacacccccctgcccttcgcttctgtcctccctggcttctctggggcacttggggctatgtacaacctggcacgatccagaaagggtgcaaacaaaatgcctacatccaggcacacgaccaagtcagcgagagctagccctggtaagcaaacatagcccattacaggttcagaacgtgcaccgggttccccaaaactgtcttcaaccacatgactcaacagctctatgggataggaactgtcagtgtttttgcaactgcaacattaaaccaagtgctgtgggcttttcaagtattattcacaacactaaaggaaagtttcttcaaagggctctctggctaatcttcaaagccgcagttaggcaaaatgacagtgtgacagcttcaaagccactgactcatgacacagccctgatgttgtaccggctaggttcagatttcagaaatcagggcacttgcatccattgccttttccaggaaagggaagaaaacactcagttgataaaccttagtactcagataataaataagagaccaaaagtaggctatcacccaaagcaaacatccttaactgaccctaacgtgtatggattcaactttgattattcaacaaaatcatgaccgactgctgtggcctggagtaaccaaaggactgttttctctacacaaagtcaggagcgaataccaacctttatttgcacttgggttccagttcaaagccaccttagacagtgtggcaaagtgggaaaaagcacagatcctgggaccaaggttcagattccatctcaagcgagcatatgaactgtgtgacaacaggcagacagtacctctgtgtctatgagaaagcggggagagcaacaccccagcttctagcagctctacagctgcctggacctgcaggccctcctaggcccacttcctccccagcacagtgtgtgttcccgggcgtgtgtggctctgggtccagctctgttcagggtgggactccaggtgaattactgaacctctgaggtgtacccccaaccccaaactttcaccaaaagcaataaagaggaactctagaactggagccaggactaagtgagaaaaactgcttataagtgcttaataaatactagttatttacaacttttgctcaagccgagggcagaggcctttgtacgcagctgccgaactctgactctagttctgcggaagaaaaggatgcggtatttgcttttgccatgatccctttccatttgattggcaggttaaataacatggtttttgaagtcacatacttaatattcttcctaaaaaccacccaaacactagatgtgtgtgtgcacacacacagaaaccacggggtagtttaaatcaccattaaaaatcaacgctttctctgattctgtgtcacagagtggtggccagtggctacaatttttaaatgattggttaagtgaaaaccagaactcaaaatattccaggagagaagataacatttacaagtaaacagtaagtgcaattgtattttaatttcttggtctccgaaaactcagctgtgactgctttccattaacagttccagctctatgtgtttcctctaacgctaaaggcacagcccccgggaatctactgcttcctaagagtctccatggagtctattttacaacctcctttccctccatgcttccgcggaggagtctatactatctctatatacacattttaaacattattcttcatttgaaattccttcaataaaaacacagtcaccattaaaaaaaa

SEQ ID NO: 22869 - DNA, 7247 bp, Homo Sapiens
gcgtccctcccagcggcgcgtgagcggcactgatttgtccctggggcggcagcgcggacccgcccggagatgaggcgtcgattagcaaggtaaaagtaacagaaccatggctcagtttccaacaccttttggtggcagcctggatatctgggccataactgtagaggaaagagcgaagcatgatcagcagttccatagtttaaagccaatatctggattcattactggtgatcaagctagaaactttttttttcaatctgggttacctcaacctgttttagcacagatatgggcactagctgacatgaataatgatggaagaatggatcaagtggagttttccatagctatgaaacttatcaaactgaagctacaaggatatcagctaccctctgcacttccccctgtcatgaaacagcaaccagttgctatttctagcgcaccaccatttggtatgggaggtatcgccagcatgccaccgcttacagctgttgctccagtgccaatgggatccattccagttgttggaatgtctccaaccctagtatcttctgttcccacagcagctgtgccccccctggctaacggggctccccctgttatacaacctctgcctgcatttgctcatcctgcagccacattgccaaagagttcttcctttagtagatctggtccagggtcacaactaaacactaaattacaaaaggcacagtcatttgatgtggccagtgtcccaccagtggcagagtgggctgttcctcagtcatcaaggctgaaatacaggcaattattcaatagtcatgacaaaactatgagtggacacttaacaggtccccaagcaagaactattcttatgcagtcaagtttaccacaggctcagctggcttcaatatggaatctttctgacattgatcaagatggaaaacttacagcagaggaatttatcctggcaatgcacctcattgatgtagctatgtctggccaaccactgccacctgtcctgcctccagaatacattccaccttcttttagaagagttcgatctggcagtggtatatctgtcataagctcaacatctgtagatcagaggctaccagaggaaccagttttagaagatgaacaacaacaattagaaaagaaattacctgtaacgtttgaagataaaaagcgggagaactttgaacgtggcaacctggaactggagaaacgaaggcaagctctcctggaacagcagcgcaaggagcaggagcgcctggcccagctggagcgggcggagcaggagaggaaggagcgtgagcgccaggagcaagagcgcaaaagacaactggaactggagaagcaactggaaaagcagcgggagctagaacggcagagagaggaggagaggaggaaagaaattgagaggcgagaggctgcaaaacgggaacttgaaaggcaacgacaacttgagtgggaacggaatcgaaggcaagaactactaaatcaaagaaacaaagaacaagaggacatagttgtactgaaagcaaagaaaaagactttggaatttgaattagaagctctaaatgataaaaagcatcaactagaagggaaacttcaagatatcagatgtcgattgaccacccaaaggcaagaaattgagagcacaaacaaatctagagagttgagaattgccgaaatcacccatctacagcaacaattacaggaatctcagcaaatgcttggaagacttattccagaaaaacagatactcaatgaccaattaaaacaagttcagcagaacagtttgcacagagattcacttgttacacttaaaagagccttagaagcaaaagaactagctcggcagcacctacgagaccaactggatgaagtggagaaagaaactagatcaaaactacaggagattgatattttcaataatcagctgaaggaactaagagaaatacacaataagcaacaactccagaagcaaaagtccatggaggctgaacgactgaaacagaaagaacaagaacgaaagatcatagaattagaaaaacaaaaagaagaagcccaaagacgagctcaggaaagggacaagcagtggctggagcatgtgcagcaggaggacgagcatcagagaccaagaaaactccacgaagaggaaaaactgaaaagggaggagagtgtcaaaaagaaggatggcgaggaaaaaggcaaacaggaagcacaagacaagctgggtcggcttttccatcaacaccaagaaccagctaagccagctgtccaggcaccctggtccactgcagaaaaaggtccacttaccatttctgcacaggaaaatgtaaaagtggtgtattaccgggcactgtacccctttgaatccagaagccatgatgaaatcactatccagccaggagacatagtcatggttaaaggggaatgggtggatgaaagccaaactggagaacccggctggcttggaggagaattaaaaggaaagacagggtggttccctgcaaactatgcagagaaaatcccagaaaatgaggttcccgctccagtgaaaccagtgactgattcaacatctgcccctgcccccaaactggccttgcgtgagacccccgcccctttggcagtaacctcttcagagccctccacgacccctaataactgggccgacttcagctccacgtggcccaccagcacgaatgagaaaccagaaacggataactgggatgcatgggcagcccagccctctctcaccgttccaagtgccggccagttaaggcagaggtccgcctttactccagccacggccactggctcctccccgtctcctgtgctaggccagggtgaaaaggtggaggggctacaagctcaagccctatatccttggagagccaaaaaagacaaccacttaaattttaacaaaaatgatgtcatcaccgtcctggaacagcaagacatgtggtggtttggagaagttcaaggtcagaagggttggttccccaagtcttacgtgaaactcatttcagggcccataaggaagtctacaagcatggattctggttcttcagagagtcctgctagtctaaagcgagtagcctctccagcagccaagccggtcgtttcgggagaagaatttattgccatgtacacttacgagagttctgagcaaggagatttaacctttcagcaaggggatgtgattttggttaccaagaaagatggtgactggtggacaggaacagtgggcgacaaggccggagtcttcccttctaactatgtgaggcttaaagattcagagggctctggaactgctgggaaaacagggagtttaggaaaaaaacctgaaattgcccaggttattgcctcatacaccgccaccggccccgagcagctcactctcgcccctggtcagctgattttgatccgaaaaaagaacccaggtggatggtgggaaggagagctgcaagcacgtgggaaaaagcgccagataggctggttcccagctaattatgtaaagcttctaaaccctgggacgagcaaaatcactccaacagagccacctaagtcaacagcattagcggcagtgtgccaggtgattgggatgtacgactacaccgcgcagaatgacgatgagctggccttcaacaagggccagatcatcaacgtcctcaacaaggaggaccctgactggtggaaaggagaagtcaatggacaagtggggctcttcccatccaattatgtgaagctgaccacagacatggacccaagccagcaatggtgttcagacttacatctcttggatatgttgaccccaactgaaagaaagcgacaaggatacatccacgagctcattgtcaccgaggagaactatgtgaatgacctgcagctggtcacagagatttttcaaaaacccctgatggagtctgagctgctgacagaaaaagaggttgctatgatttttgtgaactggaaggagctgattatgtgtaatatcaaactactaaaagcgctgagagtccgcaagaagatgtccggggagaagatgcctgtgaagatgattggagacatcctgagcgcacagctgccgcacatgcagccctacatccgcttctgcagccgccagctcaacggggctgccctgatccagcagaagacggacgaggccccagacttcaaggagttcgtcaaaagattggaaatggatcctcggtgtaaagggatgccactctctagttttatactgaagcctatgcaacgggtaacaagatacccactgatcattaaaaatatcctggaaaacacccctgaaaaccacccggaccacagccacttgaagcacgccctggagaaggcggaagagctctgttcccaggtgaacgaaggggtgcgggagaaggagaactctgaccggctggagtggatccaggcccacgtgcagtgtgaaggcctgtctgagcaacttgtgttcaattcagtgaccaattgcttggggccgcgcaaatttctgcacagtgggaagctctacaaggccaagaacaacaaggagctgtatggcttccttttcaacgacttcctcctgctgactcagatcacgaagcctttggggtcttctggcaccgacaaagtcttcagccccaaatcaaacctgcagtataaaatgtataaaacacctattttcctaaatgaggttctagtaaaattacccaccgacccttctggagacgagcccatcttccacatctcccacattgaccgcgtctatactctccgagcagaaagcataaatgaaaggactgcctgggtgcagaaaatcaaagctgcttctgaactttacatagagactgagaaaaagaagcgcgagaaagcgtacctggtccgttcccaaagggcaacaggcattggaaggttgatggtgaacgtggttgaaggcatcgagttgaaaccctgtcggtcacatggaaagagcaacccgtactgtgaggtgaccatgggttcccagtgccacatcaccaagacgatccaggacactctgaaccccaagtggaattccaactgccagttcttcatccgagacctggagcaggaagtcctctgcatcactgtgttcgagagggaccagttctcaccagatgattttttgggtcggacggagatccgtgtggcggacatcaagaaagaccagggctccaaaggtccagttacgaagtgtcttctgctgcacgaagtccccacgggagagattgtggtccgcttggacctgcagttgtttgatgagccgtaggcagcgggctcagggtgtgctcagcagggtcccagcccacggccacacatgctgtctggaaattgtattccttttctaagaaaccaccatttggtattcagtcacagggatatgggatggcaaagacaggcccctcaaagctcctaggaatcattctcgacaatcctccctgccccgaaacaatttcctgtttcatgaaacaaagctgtgttttcctttgtcctcactacaggtctcattatggcttctagggtcgctgaaatcccatagccctcaacagggtgcagctgggagtctagccccttcccgggcttgagggatgggtctggttactataaaatagatttataaatgcaatgtctatatttttggagaactcatgtaaccctcctgtttcttacatccaccagtccccaagtagacttcttggcctacaatgcccagtccttggtgtgagtttagaaacaattatgacggtcctgtcattgcttcagaatcccatctctcctgcagggaaatgctgcctagagctgatcactcggtgagacggtctgatcaggccctggcttagctctttgaagagctggtctatggaagtttccagcatgtgcaccgttatagccgttccttccccctctaggccttgtattaatatatgtcaatgaaaacacactggtgtattgttgcgtggattcagttctgattcccagcatgcttagaatatggtcacagaaagtcattatctagaaagtcacccctctgctggatcagatcactacaggtcactggaaaggcaactttacaatgttgggtcactgggtctcggttggcagccatgttggaaaaatctcttttggctcggaggcctgtgatatttcatagcagcagtcgttgctggtgacctgttctgtgcttgaatgtgctgaatcctgattgttgtaggacatttcaacagctctttttggtacgttccccaaaaagccatgtcctagatccccaaggcgtgaaaaggaaaaatatcaagctggaggttgggaaagaaaatgaaggcagtccattatgtggtgggtgaaagaccctaggaggatgcaagccccgcacatcccggggcaaagacctaagacacttttccaccctccaccaccccaacctcacataatatgcttgttgcaagagtcaggactttatgactatgtgccaagctgtttggtttgagttctttaatttttttttcccttaaatgccaggagatcatctggttagttagatagtaacttgatttgctaatgaaaagtgggggccgtgttttgtttgcatgttaatattctcataatcctagtttgttgtggtcatgaaatgccctttgcatgttctgttggtactggagtctagctttcctgtactagatggtgttctctttgattgtaggtccttagactttaattagggttatcaaagtgctttctaaatgatagcatcagcgttgtggcagagtacctcctttgctgggaactgaatgtgtagggttatcatttcccatgagagcccggtcatacttcaagcaatttttttaaaagtgtgtgttggaaaggacaacaaagtttacatttcatacttttaagaaatactttattatttatttattgaagatagtgtagaattttgtatcaagaacaacagacataagtattttttgaaacaagcaaatataccctgtagttagaaactttcaactgaacatgttagagaccaagtttaacttcaggcatgcatttgtttaccatttcccagcagaaaacatggttaaaatactttaagtttatattttttgatgttgttaagaaacttttaaattaaatctataaatagacatgcaactcatgctttcctatttctataaccaacaccgtttgtttagtgtatttatgaaagatatgctaccatggtagaaagaaaagtattcaatgtgtaaatt

SEQ ID NO: 22870 - DNA, 2347 bp, Homo Sapiens
atgagctgcaggtacggtccggaatcccgggtcgacccacgcgtccggctcctagggaggagctggtaccatgggtgtcaggcaacagttggccttgctgctgctgctgctgctcctgctctggggcctggggcagccagtgtggccagtcgctgtggccttgaccctgcgctggctcctgggggatcccacatgttgcgtgctacttgggctggccatgttagcacggccctggctcggcccctgggtgccccatgggctgagcctggcagctgcggccctggcactaaccctcctgccagcacggctgcccccaggactacgctggctgccggctgatgtgatcttcttggccaagatcctccacctgggcctgaagatcaggggatgcttgagccggcagccgcctgacacctttgtagatgccttcgagcggcgagcacgagcgcagcctggcagggcactcttggtgtggacggggcctggggccggctcagtcacctttggtgagctggatgcccgggcctgccaggcggcatgggccctgaaggctgagctgggtgaccctgcgagcctgtgtgccggggagcctactgccctccttgtgctggcttcccaggccgttccagccctgtgtatgtggctggggctggccaagctgggctgcccaacagcctggatcaacccgcatggccgggggatgcccctggcgcactctgtgctgagctctggggcccgggtgctggtggtggacccagacctccgggagagcctggaggagatccttcccaagctgcaggctgagaacatccgctgcttctacctcagccatacctcccctacaccaggggtgggggctctgggggctgccctggatgcagcgccctcccacccagtgcctgctgacctgcgtgctgggatcacatggagaagccctgccctcttcatctatacctcggggaccactggcctcccgaagccagccatcctcacgcatgagcgggtactgcagatgagcaagatgctgtccttatctggggccacagctgatgatgtggtttacacggtcctgcctctgtaccacgtgatgggacttgtcgttgggatcctcggctgcttagatctcggagccacctgtgttctggcccccaagttctctacttcctgcttctgggatgactgtcggcagcatggcgtgacagtgatcctgtatgtgggcgagctcctgcggtacttgtgtaacattccccagcaaccagaggaccggacacatacagtccgcctggcaatgggcaatggactacgggctgatgtgtgggagaccttccagcagcgcttcggtcctattcggatctgggaagtctacggctccacagaaggcaacatgggcttagtcaactatgtggggcgctgcggggccctgggcaagatgagctgcctcctccgaatgctgtccccctttgagctggtgcagttcgacatggaggcggcggagcctgtgagggacaatcagggcttctgcatccctgtagggctaggggagccggggctgctgctgaccaaggtggtaagccagcaacccttcgtgggctaccgcggcccccgagagctgtcggaacggaagctggtgcgcaacgtgcggcaatcgggcgacgtttactacaacaccggggacgtactggccatggaccgcgaaggcttcctctacttccgcgaccgcctcggggacaccttccgatggaagggcgagaacgtgtccacgcacgaggtggagggcgtgttgtcgcaggtggacttcttgcaacaggttaacgtgtatggcgtgtgcgtgccaggttgtgagggtaaggtgggcatggctgctgtgcagctagcccccggccagactttcgacggggagaagttgtaccagcacgttcgcgcttggctccctgcctacgctaccccccatttcatccgcatccaggacgccatggaggtcaccagcacgttcaaactgatgaagacccggttggtgcgtgagggcttcaatgtggggatcgtggttgaccctctgtttgtactggacaaccgggcccagtccttccggcccctgacggcagaaatgtaccaggctgtgtgtgagggaacctggaggctctgatcacctggccaacccactggggtaggggtagggatcaaagccagccacccccaccccaacacactcggtgtccctttcatcctgggcctgtgtgaatcccagcctggccataccctcaacctcagtgggctggaaatgacagtgggccctgtagcagtggcagaataaactcagatgtgttcaaaaaaaaaaaaaaaaaaaaaa

SEQ ID NO: 22871 - DNA, 3985 bp, Homo Sapiens
  misc_feature (3751)..(3751): n is a, c, g, or t
  misc_feature (3755)..(3755): n is a, c, g, or t
  misc_feature (3802)..(3802): n is a, c, g, or t
  misc_feature (3876)..(3876): n is a, c, g, or t
  misc_feature (3924)..(3924): n is a, c, g, or t
  misc_feature (3974)..(3974): n is a, c, g, or t
ggagccctgggcgcgggggcggcgtgtcaggtggttgcggagctggtaagaatcatattctaagaactcagccactcaggtatccaccatggtgctgggtcctgaacagaagatgtcagatgacagtgtttctggagatcatggggagtctgccagtcttggtaacatcaaccctgcctatagtaatccctctctttcacagtcccctggggactcagaggagtacttcgccacttactttaatgagaagatctccattcctgaggaggagtactcttgttttagctttcgtaaactctgggctttcaccggaccaggttttcttatgagcattgcctacctggatccaggaaatattgaatccgatttgcagtctggagcagtggctggatttaagttgctctggatccttctgttggccacccttgtggggctgctgctccagcggcttgcagctagactgggagtggttactgggctgcatcttgctgaagtatgtcaccgtcagtatcccaaggtcccacgagtcatcctgtggctgatggtggagttggctatcatcggctcagacatgcaagaagtcattggctcagccattgctatcaatcttctgtctgtaggaagaattcctctgtggggtggcgttctcatcaccattgcagatacttttgtatttctcttcttggacaaatatggcttgcggaagctagaagcattttttggctttctcatcactattatggccctcacatttggatatgagtatgttacagtgaaacccagccagagccaggtactcaagggcatgttcgtaccatcctgttcaggctgtcgcactccacagattgaacaggctgtgggcatcgtgggagctgtcatcatgccacacaacatgtacctgcattctgccttagtcaagtctagacaggtaaaccggaacaataagcaggaagttcgagaagccaataagtactttttcattgaatcctgcattgcactctttgtttccttcatcatcaatgtctttgttgtctcagtctttgctgaagcattttttgggaaaaccaacgagcaggtggttgaagtctgtacaaataccagcagtcctcatgctggcctctttcctaaagataactcgacactggctgtggacatctacaaagggggtgttgtgctgggatgttactttgggcctgctgcactctacatttgggcagtggggatcctggctgcaggacagagctccaccatgacaggaacctattctggccagtttgtcatggagggattcctgaacctaaagtggtcacgctttgcccgagtggttctgactcgctctattgccatcatccccactctgcttgttgctgtcttccaagatgtagagcatctaacagggatgaatgactttctgaatgttctacagagcttacagcttccctttgctctcatacccatcctcacatttacgagcttgcggccagtaatgagtgactttgccaatggactaggctggcggattgcaggaggaatcttggtccttatcatctgttccatcaatatgtactttgtagtggtttatgtccgggacctagggcatgtggcattatatgtggtggctgctgtggtcagcgtggcttatctgggctttgtgttctacttgggttggcaatgtttgattgcactgggcatgtccttcctggactgtgggcatacgtgccatctgggattgacagctcagcctgaactctatcttctgaacaccatggacgctgactcacttgtgtctagatgactgacagcctgagagactctataagaacatgtttttctaagccctttttgtgccaggtgtcccgttaacgtctctgttagttcagaggtgagttttgttcagacgttttgaacaaaaggcaaagatttcctcatgggaagggtgttcaaaactgacagctataaatgtaggtcagagacccacccacctcataacagtcatacactcccagagttaaacgattggcctctgatggccacacacccctatgggcttgtgtcttggactctgggatttaaaagatatatatgtatatatatttatgtaaacctgagcatctcagtttgggtagagttttaaggttatatgaaactgatagaacttttgtattttttttttaaatattgttttgatatatcagatatttgttttgtctggatcacaagtgagaaagaaaagagaataatgctctttttcacaatgaactggtcaaattgactatcttgtaaagtgatactttactatgtcagtgaaatttcagtttgattttagtcaaccagattatatcctttgtatctactgatattaacacatcatattaacacatcatttcttaaaaaaacatttcttctgtttggcaatcataattaactctggttatcagcctattttgtaattattgtctttgtcgtcacttttcttgaattgttttctagtcattaaacagatatgaaggcattgccaaagagctttaatatccagtaacaagatccagaaaccaaactttaaccagtgatcagttttccgtgctgcattgtaactcagctcattctggcattcaagttttaggcaaaaaaagaggaaacttctaacatttagcttgtaagtcctgacataagatagtgaagatatttatcttctttctaatatttgtatagtccgccaatgtattttcttcccactattcccattaacataccaaacactgtttctaggtccaaagtctatttctaggagtggccaatatttgtattgttgaatctcctagggaatgctaaatgtttcactttaaaatacctatttataccaagtagcatgagattagtactagagtgagatttggaatattagtccacatatcacaaactgcttgcctacatgtatagattttttttttcacccaccttcctaaccaggaatttgtttccttaaatttgttgttgttgttgttgttgtttgttgttatttttttgagaagagtcttgccctgtcgccaaggcgggaatgcattgacgtgatctcagttcactgtaacctctacctccccggtttaatcgattctcctccttcagcctcctgaatagctgggattccaggcaccccatttttagtggagatggggtttcaccatgttggccaggctggtctcaaactcttgacctcaagtgatctacctgcctcagcctcccaaagtgctgggattacaggtgtgagccactgcacccagcgttttttgttgttaagacagggtcttgctctgttgcccaggctggagtgcagtggtgtgatctcagctcactgcaacttctgccacctgggcttaagccatcctcccacttcagcatcccaaatagctgggactgcaggcacacaccaccacacccagctaatttttgtattttttgtagagacgggatttcaccatgttgcccaggctggtgttgaactcatgagctcaagtaatctgctggccttggcctcccaaagtgctgagattataggcgtgaaccactgcatccagctcactcctcatttctttctagccccaaaggtgttgagtcagcaaatcctgcagcctttgtgtgactttgagcatcactttcccctttcagcattaaatatatgacctctctgccttattttagaacttactacatttcaataaaactttttaaaaaatccagacattgcctatgntcgnttataatcggcccttaaagaggcagggatttttctaaaatgacactntaaaatttcctcatttctacttcagggcctcttgaaacttcagataatgagagcagccaaccctgcaagtcagngctatagagtccttctgatcttaaaactgagactgaattcacatcagntttcgcttttacttgaaaaagagactcttaagtgttttggtttctttatncaggacaacaa

SEQ ID NO: 22872 - DNA, 3276 bp, Homo Sapiens
gcaggtagcaaaatggcggatcatgtgcagagcctggcccaactagagaatctgtgcaaacagctgtatgaaaccacagacacaaccactcgactccaggcagagaaagccttggttgaatttaccaacagccctgattgcctgagcaagtgccagctactcctcgaaagaggaagttcctcttactcccagttactggcagctacatgccttaccaagcttgtatcacgcacaaacaaccccctaccattggaacagcgaatagatattcggaactatgtgctcaactaccttgccactcggccgaagttggctactttcgtgacacaagcacttattcagttatatgccagaatcacaaaactgggctggtttgactgtcagaaggatgactatgtcttcagaaatgcaatcacagacgtcacaaggtttttacaggatagtgttgaatactgcatcattggtgtcacaattttatctcagctaaccaatgaaattaatcaagcagacaccacccatcctttaaccaagcacagaaaaatagcctcttcttttcgcgattcatcattatttgatatcttcacactttcctgcaatttactaaaacaggcttcaggaaagaatctaaacttgaatgatgaaagtcagcatggcttgctcatgcaactgctcaagctcactcataactgcctcaactttgacttcatcggcacttccactgatgagtcctcagacgacctgtgtacagtgcagattcccaccagctggagatcagccttcttagattcttcaaccttgcagctgttttttgacctgtatcattccatccctccttcattttcacctctggtattatcctgcttggtacagatcgcttcagtcagaagatccctgtttaacaatgcagagagggccaagtttctctctcatcttgttgatggtgttaaacgaatactggaaaacccacagagtttatcagacccaaacaattaccatgagttttgcagactactggcccgattgaagagtaactatcaactgggagaattggtaaaggtggaaaactaccctgaggtcatccgattgatagccaacttcacagtgaccagcctacagcactgggaatttgctccaaatagtgtgcactatcttctgagcctgtggcagcggctggcagcctctgtgccgtatgtcaaagccacagagccccacatgctggaaacttacactcctgaggtcaccaaagcctacatcacatcccggttggaatctgtgcacatcatactgagagatggcctggaagatcccctggaggatacggggctggtccagcagcagttggaccagctgtccaccattgggcgttgtgaatatgagaagacgtgtgcactcctcgtgcagttgtttgaccagtcggcccagtcgtaccaggagctgctacagagcgccagcgcaagcccaatggacattgcagtgcaggagggaaggctgacatggctggtttacattattggagcagtgatcggtggccgggtttcttttgccagcactgatgagcaagacgccatggatggtgagcttgtctgtcgggtgctccagctgatgaacctaacagattctcgtttggcccaggcgggtaatgagaagctagagttggccatgctgagcttttttgaacagtttcgtaagatctacattggggaccaagtgcagaaatcctctaagctgtaccgccgactctcagaagttctgggcttgaatgatgagaccatggtcctaagcgtcttcataggaaaaatcatcaccaacttgaagtactggggccgttgtgaaccaatcacctccaagacactacagcttctcaatgacctgtccattgggtacagtagcgtaaggaagctagtgaagcttagtgcggtacagttcatgctgaacaatcacacgagcgagcacttttcatttttgggtattaacaatcagtccaacctgacagacatgcggtgtcggactaccttctacacagcacttgggcgtctcctcatggtggatttaggagaggatgaagatcagtatgagcagttcatgctgccactcacagcagcatttgaggctgtggcccagatgtttagcaccaatagtttcaacgagcaggaggcaaagcgaactctagttggcctagtaagagacctgagagggatcgctttcgctttcaatgccaagaccagcttcatgatgctctttgaatggatatatccatcctatatgccaattctccaacgggcaattgagctctggtaccatgatccagcctgtactacacctgtactcaagttgatggctgaattggttcataataggtcccagcgactccagtttgatgtctcttcccccaatggcatcttactcttccgagaaaccagcaagatgataacaatgtatggcaatcgcatcctgacactaggagaggtcccaaaggatcaggtctatgctctgaagctcaagggcatctccatctgcttctccatgctgaaggctgctctcagtgggagttacgtcaatttcggagtctttcgtctctatggagacgatgccctggacaatgctctgcagaccttcatcaagctgctcctctctattcctcacagtgatctcttggattaccccaagctcagccagtcttattattcactactggaagtcctgacccaggaccatatgaactttattgcaagcctggaacctcacgtcatcatgtatattctctcttccatttctgaaggacttactgcacttgacaccatggtatgcacaggctgctgctcctgcctggaccacattgtgacatacctcttcaagcagctgtcacgtagcaccaagaagaggaccacacccctgaaccaggagagcgaccgctttctgcacatcatgcagcagcatccagagatgatccagcagatgctgtccacggtgctgaacatcatcatctttgaagactgtaggaaccagtggtctatgtcccgaccactacttggcttgatattgcttaatgaaaagtatttttctgacctaagaaacagtattgtgaacagccagccaccggagaagcagcaggccatgcacctgtgttttgagaacctgatggaaggcatcgagcgaaatcttcttacgaaaaacagagacaggttcacccagaacctgtcagcattccgtcgagaagtcaacgactcaatgaagaattccacttatggcgtgaatagcaatgacatgatgagctga

SEQ ID NO: 22873 - DNA, 3372 bp, Homo Sapiens
cggctccgctccgcactgcccggcgccgcctcgccatggacgcgcgcgggggcggcgggcggcccggggagagcccgggcgcgagccccacgaccgggccgccgccgccgccgcccccgcgcccccccaaacagcagccgccgccgccgccgccgcccgcgccccccccgggccccgggcccgcgcccccccagcacccgccccgggccgaggcgttgcccccggaggcggcggatgagggcggcccgcggggccggctccgcagccgcgacagctcgtgcggccgccccggcaccccgggcgcggcgagcacggccaagggcagcccgaacggcgagtgcgggcgcggcgagccgcagtgcagccccgcggggcccgagggcccggcgcgggggcccaaggtgtcgttctcgtgccgcggggcggcctcggggcccgcgccggggccggggccggcggaggaggcgggcagcgaggaggcgggcccggcgggggagccgcgcggcagccaggccagcttcatgcagcgccagttcggcgcgctcctgcagccgggcgtcaacaagttctcgctgcggatgttcggcagccagaaggccgtggagcgcgagcaggagcgcgtcaagtcggcgggggcctggatcatccacccgtacagcgacttcaggttctactgggacttcaccatgctgctgttcatggtgggaaacctcatcatcatcccagtgggcatcaccttcttcaaggatgagaccactgccccgtggatcgtgttcaacgtggtctcggacaccttcttcctcatggacctggtgttgaacttccgcaccggcattgtgatcgaggacaacacggagatcatcctggaccccgagaagatcaagaagaagtatctgcgcacgtggttcgtggtggacttcgtgtcctccatccccgtggactacatcttccttatcgtggagaagggcattgactccgaggtctacaagacggcacgcgccctgcgcatcgtgcgcttcaccaagatcctcagcctcctgcggctgctgcgcctctcacgcctgatccgctacatccatcagtgggaggagatcttccacatgacctatgacctggccagcgcggtgatgaggatctgcaatctcatcagcatgatgctgctgctctgccactgggacggctgcctgcagttcctggtgcctatgctgcaggacttcccgcgcaactgctgggtgtccatcaatggcatggtgaaccactcgtggagtgaactgtactccttcgcactcttcaaggccatgagccacatgctgtgcatcgggtacggccggcaggcgcccgagagcatgacggacatctggctgaccatgctcagcatgattgtgggtgccacctgctacgccatgttcatcggccacgccactgccctcatccagtcgctggactcctcgcggcgccagtaccaggagaagtacaagcaggtggagcagtacatgtccttccacaagctgccagctgacttccgccagaagatccacgactactatgagcaccgttaccagggcaagatgtttgacgaggacagcatcctgggcgagctcaacgggcccctgcgggaggagatcgtcaacttcaactgccggaagctggtggcctccatgccgctgttcgccaacgccgaccccaacttcgtcacggccatgctgaccaagctcaagttcgaggtcttccagccgggtgactacatcatccgcgaaggcaccatcgggaagaagatgtacttcatccagcacggcgtggtcagcgtgctcactaagggcaacaaggagatgaagctgtccgatggctcctacttcggggagatctgcctgctcacccggggccgccgcacggcgagcgtgcgggctgacacctactgccgcctctattcgctgagcgtggacaacttcaacgaggtgctggaggagtaccccatgatgcggcgcgccttcgagacggtggccatcgaccgcctggaccgcatcggcaagaagaattccatcctcctgcacaaggtgcagcatgacctcaactcgggcgtattcaacaaccaggagaacgccatcatccaggagatcgtcaagtacgaccgcgagatggtgcagcaggccgagctgggtcagcgcgtgggcctcttcccgccgccgccgccgccgccgcaggtcacctcggccatcgccacgctgcagcaggcggcggccatgagcttctgcccgcaggtggcgcggccgctcgtggggccgctggcgctcggctcgccgcgcctcgtgcgccgcccgcccccggggcccgcacctgccgccgcctcacccgggcccccgccccccgccagccccccgggcgcgcccgccagcccccgggcaccgcggacctcgccctacggcggcctgcccgccgccccccttgctgggcccgccctgcccgcgcgccgcctgagccgcgcgtcgcgcccactgtccgcctcgcagccctcgctgcctcacggcgcccccggccccgcggcctccacacgcccggccagcagctccacaccgcgcttggggcccacgcccgctgcccgggccgccgcgcccagcccggaccgcagggactcggcctcacccggcgccgccggcggcctggacccccaggactccgcgcgctcgcgcctctcgtccaacttgtgaccctcgccgaccgccccgcgggcccaggcgggccgggggcggggccgtcatccagaccaaagccatgccattgcgctgccccggccgccagtccgcccagaagccatagacgagacgtaggtagccgtagttggacggacgggcagggccggcggggcagccccctccgcgcccccggccgtcccccctcatcgccccgcgcccacccccatcgcccctgcccccggcggcggcctcgcgtgcgagggggctcccttcacctcggtgcctcagttcccccagctgtaagacagggacggggcggcccagtggctgagaggagccggctgtggagccccgcccgccccccaccctctaggtggcccccgtccgaggaggatcgttttctaagtgcaatacttggcccgccggcttcccgctgcccccatcgcgctcacgcaataaccggcccggcccccgtccgcgcgcgtcccccggtgacctcggggagcagcaccccgcctccctccagcactggcaccgagaggcaggcctggctgcgcagggcgcgggggggaggctggggtcccgccgccgtgatgaatgtactgacgagccgaggcagcagtgcccccaccgtggccccccacgccccattaacccccacacccccattccgcgcaataaa

SEQ ID NO: 22874 - DNA, 3352 bp, Homo Sapiens
acgagggacgcagccatggcggaggcggctttggaagccgtgcggagcgagttacgagaattcccggccgctgcaagggagctctgcgtgcctcttgctgtgccctacctggacaaacccccaactccgctccacttctaccgggactgggtctgccccaacaggccgtgcattatccgcaacgctctgcagcactggccggccctccagaagtggtccctcccctatttcagagccacagtgggctccacagaggtgagtgtggccgtgaccccagatggttacgcggatgccgtgagaggggatcgcttcatgatgccagctgagcgccgcctgcccctgagcttcgtgctggatgtgctggagggccgggcccagcaccctggagtcctctatgtgcagaagcagtgctccaacctgcccagcgagctgccccagctgctgcctgatctggaatcccatgtgccctgggcctccgaagccctgggaaagatgcccgatgctgtgaacttctggctgggggaggcggctgcagtgacttctttgcacaaggaccactatgagaacctctactgcgtggtctcaggagagaagcatttcctgttccatccgcccagcgaccggcccttcatcccctatgagctgtacacgccggcaacctaccagctaactgaagagggcacctttaaggtggtggatgaagaggccatggagaaggcagaggtgtccaggacctgcctgctcacggttcgtgtcctgcaggcccatcgcctaccctctaaggacctagtgaccccctctgactgctacgtgactctctggctgcccacggcctgcagccacaggctccagacacgcacggtcaagaacagcagtagccctgtctggaaccagagctttcacttcaggatccacaggcagctcaagaatgtcatggaactgaaagtctttgaccaggacctggtgaccggagatgaccctgtgttgtcagtactgtttgatgcggggactctgcgggctggggagttccggcgcgagagcttctcactgagccctcagggtgaggggcgcctggaagttgaatttcgcctgcagagtctggctgaccgtggcgagtggctcgtcagcaatggcgttctggtggcccgggagctctcctgcttgcacgttcaactggaggagacaggagaccagaagtcctcagagcacagagttcagcttgtggttcctgggtcctgtgagggtccgcaggaggcctctgtgggcactggcaccttccgcttccactgcccagcctgctgggagcaggagctgagtattcgcctgcaggatgcccccgaggagcaactaaaggcgccactgagtgccctgccctctggtcaagtggtgaggcttgtcttccccacgtcccaggagcccctgatgagagtggagctgaaaaaagaagcaggactgagggagctggccgtgcgactgggcttcgggccctgtgcagaggagcaggccttcctgagcaggaggaagcaggtggtggccgcggccttgaggcaggccctgcagctggatggagacctgcaggaggatgagatcccagtggtagctattatggccactggtggtgggatccgggcaatgacttccctgtatgggcagctggctggcctgaaggagctgggcctcttggattgcgtctcctacatcaccggggcctcgggctccacctgggccttggccaacctttatgaggacccagagtggtctcagaaggacctggcagggcccactgagttgctgaagacccaggtgaccaagaacaagctgggtgtgctggcccccagccagctgcagcggtaccggcaggagctggccgagcgtgcccgcttgggctacccaagctgcttcaccaacctgtgggccctcatcaacgaggcgctgctgcatgatgagccccatgatcacaagctctcagatcaacgggaggccctgagtcatggccagaaccctctgcccatctactgtgccctcaacaccaaagggcagagcctgaccacttttgaatttggggagtggtgcgagttctctccctacgaggtcggcttccccaagtacggggccttcatcccctctgagctctttggctccgagttctttatggggcagctgatgaagaggcttcctgagtcccgcatctgcttcttagaaggtatctggagcaacctgtatgcagccaacctccaggacagcttatactgggcctcagagcccagccagttctgggaccgctgggtcaggaaccaggccaacctggacaaggagcaggtcccccttctgaagatagaagaaccaccctcaacagccggcagratagctgagtttttcaccgatcttctgacgtggcgtccactggcccaggccacacataatttcctgcgtggcctccatttccacaaagactactttcagcatcctcacttctccacatggaaagctaccactctggatgggctccccaaccagctgacaccctcggagccccacctgtgcctgctggatgttggctacctcatcaataccagctgcctgcccctcctgcagcccactcgggacgtggacctcatcctgtcattggactacaacctccacggagccttccagcagttgcagctcctgggccggttctgccaggagcaggggatcccgttcccacccatctcgcccagccccgaagagcagctccagcctcgggagtgccacaccttctccgaccccacctgccccggagcccctgcggtgctgcactttcctctggtcagcgactccttccgggagtactcggcccctggggtccggcggacacccgaggaggcggcagctggggaggtgaacctgtcttcatcggactctccctaccactacacgaaggtgacctacagccaggaggacgtggacaagctgctgcacctgacacattacaatgtctgcaacaaccaggagcagctgctggaggctctgcgccaggcagtgcagcggaggcggcagcgcaggccccactgatggccggggcccctgccacccctaactctcattcattccctggctgctgagttgcaggtgggaactgtcatcacgcagtgcttcagagcctcgggctcaggtggcackgtcccagggtccaggctgagggctgggagctcccttgcgcctcagcagtttgcagtggggtaaggaggccaagcccatttgtgtaatcacccaaaaccccccggcctgtgcctgttttcccttctgcgctaccttgagtagttggagcacttgatacatcacagactcatacaaaaaaaaaaaaaaaaaa

SEQ ID NO: 22875 - DNA, 7252 bp, Homo Sapiens
acgagggacgcagccatggcggaggcggctttggaagccgtgcggagcgagttacgagaattcccggccgctgcaagggagctctgcgtgcctcttgctgtgccctacctggacaaacccccaactccgctccacttctaccgggactgggtctgccccaacaggccgtgcattatccgcaacgctctgcagcactggccggccctccagaagtggtccctcccctatttcaggtgggagctgccctggggtcaggtgtgagcagtgattactggcatctgggcatgggctgagtgtccattcctctagagccacagtgggctccacagaggtgagtgtggccgtgaccccagatggttacgcggatgccgtgagaggggatcgcttcatgatgccagctgagcgccgcctgcccctgagcttcgtgctggatgtgctggagggccgggcccagcaccctggagtcctctatgtgcagaagcagtgctccaacctgcccagcgagctgccccagctgctgcctgatctggaatcccatgtgccctgggcctccgaagccctgggaaagatgcccgatgctgtgaacttctggctgggggaggcggctgcagtgacttctttgcacaaggaccactatgagaacctctactgcgtggtctcaggagagaagcatttcctgttccatccgcccagcgaccggcccttcatcccctatgagctgtacacgccggcaacctaccagctaactgaagagggcacctttaaggtggtggatgaagaggccatggagaaggtgccctggatcccactggaccccttggcgccagacctagcacggtaccctagttacagtcaggcccaggcccttcgctgcacggtgcgggccggtgagatgctctatctgccggctctgtggttccaccacgtccagcagtcccagggctgcatcgcagtgaatttctggtatgacatggaatacgacctcaagtatagttacttccagctgctcgactccctcaccaaggtttcaggccttgactgatggagcactggtgaacacgaccaagcacgcctcgggggacggagccagcccctccctggccaggtcaattctcgagagagcctggagtgtgcatgctggctgctggccccgggtccagcatggcttgagatcagctttggaggatcttggaatgtggtcataaggactcaaggtgccaggcaggtctgggtgagggttctcaggaagttgccacacaggtgagcagagtggggatcaggtgcagcggcacctctccccagcgctgtgatgttgggcgagtcactgcgtctcgggcattggtgtcctgtcagtaaagagataataatggctgtacctcgcggggctgttgtgggcttggagatgatgtctatgaggaccagcatggagctggcacacaggacatgttgaataaaaggtagctgtgagtcgtatgtccttttttttttttttttaagatggggtctcgctctgtcacccaggctggagtgcagtggtgtgatgtcagctcactgcaagctccgcctcccaggttcacactattctgcctcagcctcccaagtagctgggactacaggtgcgtgccaccatgcccggctaatttttttgtatttttagtagagacggggtttcaccgtgttagccagtatggtcttgatctcctgacctcgtgatccacctgcctcggcctcccaaaagtgctgggattacaggtgtgagctgctgcgcctggcttatgagtcgtatgttctgatcctccctcttgaagttgccttctgtggtctaaggagggcctgaaggttcaggtaaaaacttcagggtgaccttcactgggggtgagggctggatcccagcctgggcccaaagagccgtcagctgcccaagtcccgctgtccatgagagtcaccgcagcccctccctgggacaagcaagcagacctgagtcttgtagctctctggtccggacctctttggcccaggaccttgagagctattcctagctctcctatggttactgtcctcccccagttcaggggcagcaggtgggacctggtgccctggggataacccctgtttctcccataacaggcacaggcaggaagggacggaagcccccgcctctcctggggctgtccctctgaggaaagagttggtctccacacgctgacccccccacaaaccatgccctggaggcagaagaaccccctgcccctgagtgccaacccacaggcctcatccctggccactcagcacctagctttgaagggctgttttatgtgacagccactcccctgcctgtcgtgagggggcccgggtgttcatctcagattgatggatccctgccatcaagactgggcattcctgtccaacaggtgccagagttgcgaaaggcctgtgacagggaactccactcttcccttggctgctgttctgggactcacccctgctttccttctgctcagcccctggcagcaagctctccaggctgggattgcagggctgggtggggcaggcccagctggtaaaggctggcgagtgccacagaggtatcaggagctctagtataggcttagggtgcctcatttcctggacaggtggctggttcaggagtgggtgtggagcttaggtggagcagaggcggcgggtaggagggacttgggaccaattgggacatcacatccctggctctgggttagaaagctgacagtccttgatcctgtggccactgccccatcattcctgctcctgaggactcagtctcatggctgtggtaaggcctggcagggccctgggtccctactgggacccctggtcctcctacctggggcctagttaatatgtttccttatgggagctgtggtcttctccaggggtagggaggggagtttattgaccacaagaccagggtagcgggcagaagccaggggaggaggaggcttggggatgagggatccgtcctgagtgttttctgtcctgggaacgggctcctggcagagctccctggcaccacagatttgggccctggagactcagaggctcccagctgccgccctgaggccctggaagcaagtggctcctccatgctcctctgactcagttgcctggagtgtgagggccctgggctgaccctggtggatgaggccctccagcactgccctggacctggttgctccctggacttgacctgttagggtccttgtggaggcaggtgggaggccgaaaggaaacagttggcacaggcttccctggtcccggtgcgcctgccaggctgcattcccagaaccaggggcatgggtttggagggagctaccgggggaccatcttcagcctgacctggcaggacctggaggacatgacagcctgtgaggggtctgagctaggagccgcctcccctgcccaggagagagcccatttccaggatgctcttctgaccagggtggagggagggtacgagagcagctcagcctggggcccaaggccctgatgtgctacttcccctccctcgatagcttatgtcccctgccacccaagaccagccggaaagctgcttggctggggtgtgggctggggatgtggggtggagagcctaaaggatactagcccgagaaggtggaagcaggtctgtgtgaggcataaatctggagccagcctgcccgggctccaaccccaattgtggacctcaggcaagtgactgcttctctgtgcctcagtttccttgtggagtgggccatcgtaaatagtatctgtgcataaggtggttgtgcgataaatgagttaatgtatgcaaagcccttggcccagagccggcgcagagcattgtgtaagtgctggcaggcgtcatgatggagatatgatgtctcctcttgttgattcaggattctgatgagatggaggatgggcctggggttcaggattaggtcttgaggcactgctccagcctcctttgtggcccctgtcacccttggcttcatcggcccgtagcaggtctcccctctcccacctctgcaggcagaggtgtccaggacctgcctgctcacggttcgtgtcctgcaggcccatcgcctaccctctaaggacctagtgaccccctctgactgctacgtgactctctggctgcccacggcctgcagccacaggctccagacacgcacggtcaagaacagcagtagccctgtctggaaccagagctttcacttcaggatccacaggcagctcaagaatgtcatggaactgaaagtctttgaccaggacctggtgaccggagatgaccctgtgttgtcagtactgtttgatgcggggactctgcgggctggggagttccggcgcgagagcttctcactgagccctcagggtgaggggcgcctggaagttgaatttcgcctgcagagtctggctgaccgtggcgagtggctcgtcagcaatggcgttctggtggcccgggagctctcctgcttgcacgttcaactggaggagacaggagaccagaagtcctcagagcacagagttcagcttgtggttcctgggtcctgtgagggtccgcaggaggcctctgtgggcactggcaccttccgcttccactgcccagcctgctgggagcaggagctgagtattcgcctgcaggatgcccccgaggagcaactaaaggcgccactgagtgccctgccctctggtcaagtggtgaggcttgtcttccccacgtcccaggagcccctgatgagagtggagctgaaaaaagaagcagggctggagtgcaatggcgtgatcttggctcactgcaacctccgcctctggggttcaagcgattctcctgcctcagcctcccgagtagctgggattacagactgagggagctggccgtgcgactgggcttcgggccctgtgcagaggagcaggccttcctgagcaggaggaagcaggtggtggccgcggccttgaggcaggccctgcagctggatggagacctgcaggaggatgagatcccagtggtagctattatggccactggtggtgggatccgggcaatgacttccctgtatgggcagctggctggcctgaaggagctgggcctcttggattgcgtctcctacatcaccggggcctcgggctccacctgggccttggccaacctttatgaggacccagagtggtctcagaaggacctggcagggcccactgagttgctgaagacccaggtgaccaagaacaagctgggtgtgctggcccccagccagctgcagcggtaccggcaggagctggccgagcgtgcccgcttgggctacccaagctgcttcaccaacctgtgggccctcatcaacgaggcgctgctgcatgatgagccccatgatcacaagctctcagatcaacgggaggccctgagtcatggccagaaccctctgcccatctactgtgccctcaacaccaaagggcagagcctgaccacttttgaatttgggggtgagtggcccaagagctgagacctgtgcccttgcagttggtggaataaggggagaacgaggactgtgtgcagattgcagatgtcacacccacctctcctgagccaggtcccgtgctttctggagaccggcaccctaccagggtccctcagccctttgggaaggaggcaggggccttaggtcctatgcacgaagcccaggccacaaggcctgggcctcctggtcctcagctgccctaaagcaaaaccctgggtcggggtgggggtgtgggtgcctaagggctctgcaccatgaggctgaggcgtggactcctcacagagtggtgcgagttctctccctacgaggtcggcttccccaagtacggggccttcatcccctctgagctctttggctccgagttctttatggggcagctgatgaagaggcttcctgagtcccgcatctgcttcttagaaggtatctggagcaacctgtatgcagccaacctccaggacagcttatactgggcctcagagcccagccagttctgggaccgctgggtcaggaaccaggccaacctgggtaagtgctccgggcccttcataagggtgccaaggggcagccagctggggctgcaccagggggcggggggttcacacctcttccccctccagggtcaccaccaaggtggggataaaggtgcaggagtccccatttcccccaccttgcctgtgtagacaaggagcaggtcccccttctgaagatagaagaaccaccctcaacagccggcagratagctgagtttttcaccgatcttctgacgtggcgtccactggcccaggccacacataatttcctgcgtggcctccatttccacaaagactactttcagcatcctcacttctccacatggaaagctaccactctggatgggctccccaaccagctgacaccctcggagccccacctgtgcctgctggatgttggctacctcatcaataccagctgcctgcccctcctgcagcccactcgggacgtggacctcatcctgtcattggactacaacctccacggagccttccagcagttgcagctcctgggccggttctgccaggagcaggggatcccgttcccacccatctcgcccagccccgaagagcagctccagcctcgggagtgccacaccttctccgaccccacctgccccggagcccctgcggtgctgcactttcctctggtcagcgactccttccgggagtactcggcccctggggtccggcggacacccgaggaggcggcagctggggaggtgaacctgtcttcatcggactctccctaccactacacgaaggtgacctacagccaggaggacgtggacaagctgctgcacctgacacattacaatgtctgcaacaaccaggagcagctgctggaggctctgcgccaggcagtgcagcggaggcggcagcgcaggccccactgatggccggggcccctgccacccctaactctcattcattccctggctgctgagttgcaggtgggaactgtcatcacgcagtgcttcagagcctcgggctcaggtggcackgtcccagggtccaggctgagggctgggagctcccttgcgcctcagcagtttgcagtggggtaaggaggccaagcccatttgtgtaatcacccaaaaccccccggcctgtgcctgttttcccttctgcgctaccttgagtagttggagcacttgatacatcacagactcatacaaaaaaaaaaaaaaaaaa

SEQ ID NO: 22876 - DNA, 1390 bp, Homo Sapiens
gggaaaaatgctcttttgggtgctaggcctcctaatcctctgtggttttctgtggactcgtaaaggaaaactaaagattgaagacatcactgataagtacatttttatcactggatgtgactcgggctttggaaacttggcagccagaacttttgataaaaagggatttcatgtaatcgctgcctgtctgactgaatcaggatcaacagctttaaaggcagaaacctcagagagacttcgtactgtgcttctggatgtgaccgacccagagaatgtcaagaggactgcccagtgggtgaagaaccaagttggggagaaaggtctctggggtctgatcaataatgctggtgttcccggcgtgctggctcccactgactggctgacactagaggactacagagaacctattgaagtgaacctgtttggactcatcagtgtgacactaaacatgcttcctcgacctcaagaggatcagcctggccagggtggcacaactcttccttccccgtgcacagcaggaaagctgccatcagttggagggggctatactccatccaaatatgcagtggaaggtttcaatgacagcttaagacgggacatgaaagcttttggtgtgcacgtctcatgcattgaaccaggattgttcaaaacaaacttggcagatccagtaaaggtaattgaaaaaaaactcgccatttgggagcagctgtctccagacatcaaacaacaatatggagaaggttacattgaaaaaagtctagacaaactgaaaggcaataaatcctatgtgaacatggacctctctccggtggtagagtgcatggaccacgctctaacaagtctcttccctaagactcattatgccgctggaaaagatgccaaaattttctggatacctctgtctcacatgccagcagctttgcaagactttttattgttgaaacagaaagcagagctggctaatcccaaggcagtgtgactcagctaaccacaaatgtctcctccaggctatgaaattggccgatttcaagaacacatctccttttcaaccccattccttatctgctccaacctggactcatttagatcgtgcttatttggattgcaaaagggagtcccaccatcgctggtggtatcccagggtccctgctcaagttttctttgaaaaggagggctggaatggtacatcacataggcaagtcctgccctgtatttaggctttgcctgcttggtgtgatgtaagggaaattgaaagacttgcccattcaaaatgatctttaccgtggcctgccccatgcttatggtccccagcatttacagtaacttgtgaatgttaagtatcatctcttatctaaatattaaaagataagtcaaacattaaaaaaaaaaa

SEQ ID NO: 22877 - DNA, 1734 bp, Homo Sapiens
tttcccttccgctcttccctggtccagtccaccctggcggggtcgcagggttgggatggcggctggaggcgatcatggttcgcccgacagctaccgctcacctcttgcctcccgctatgccagcccggagatgtgcttcgtgtttagcgacaggtataaattccggacatggcggcagctgtggctgtggctggcggaggccgagcagacattgggtttgcctatcacagatgaacaaatccaggagatgaaatcaaacctggagaacatcgacttcaagatggcagctgaggaagagaaacgtttacgacatgatgtgatggctcacgtgcacacatttggccactgctgtccaaaagctgcaggcattattcaccttggtgctacttcttgctatgttggagacaatactgacttgattattcttagaaatgcacttgacctgcttttgccaaagcttgccagagtgatctctcggcttgccgactttgctaaggaacgagccagtctacccacattaggtttcacacatttccagcctgcacagctgaccacagttgggaaacgttgctgtctttggattcaggatctttgcatggatctccagaacttgaagcgtgtccgagatgacctgcgcttccggggagtaaagggtaccactggcactcaggccagtttcctgcagctctttgagggagatgaccataaggtagagcagcttgacaagatggtgacagaaaaggcaggatttaagagagctttcatcatcacagggcagacatatacacgaaaagtggatattgaagtactgtctgtgctggctagcttgggggcatcagtgcacaagatttgcaccgacatacgcctcctggcaaacctcaaggagatggaggaaccctttgaaaaacagcagattggctcaagtgcgatgccatataagcggaatcccatgcgttcagaacgttgctgcagtcttgcccgccacctgatgacccttgtcatggacccgctacagacagcatctgtccagtggtttgaacgcacactggatgatagtgccaaccgacggatctgtttggccgaggcatttcttaccgcagatactatattgaatacgctgcagaacatttctgaaggattggtcgtgtaccccaaagtaattgaacggcgcattcggcaagagctgcctttcatggccacagagaacatcatcatggccatggtcaaagctggaggtagccgccaggattgccatgagaaaatcagagtgctttctcagcaggcagcttctgtggttaagcaggaagggggtgacaatgacctcatagagcgtatccaggttgatgcctacttcagtcccattcactcccagttggatcatttactggatccttcttctttcactggtcgtgcctcccagcaggtgcagagattcttagaagaggaggtgtatcccctgttaaaaccatatgaaagcgtgatgaaggtgaaagcagaattatgtctgtagagttggaagagaattaaacgaaaatcattgttaattgctgaggcatgaaaattgtgttactataatgccttattttacctcgagaattgttaccttaaattagtacagcactttcttcttcccatggtgctttcctgtttctcagtctcacatttctcaacaaggcaaaaacaaagagcgttgaagttgactctgctcttgcatagtaaatgtagttcatactt

SEQ ID NO: 22878 - DNA, 2877 bp, Homo Sapiens
ctgcaggcttcaggaggggacacaagcatggagcggctttggggtctattccagagagcgcaacaactgtccccaagatcctctcagaccgtctaccagcgtgtggaaggcccccggaaagggcacctggaggaggaagaggaagacggggaggagggggcggagacattggcccacttctgccccatggagctgaggggccctgagcccctgggctctagacccaggcagccaaacctcattccctgggcggcagcaggacggagggctgccccctacctggtcctgacggccctgctgatcttcactggggccttcctactgggctacgtcgccttccgagggtcctgccaggcgtgcggagactctgtgttggtggtcagtgaggatgtcaactatgagcctgacctggatttccaccagggcagactctactggagcgacctccaggccatgttcctgcagttcctgggggaggggcgcctggaggacaccatcaggcaaaccagccttcgggaacgggtggcaggctcggccgggatggccgctctgactcaggacattcgcgcggcgctctcccgccagaagctggaccacgtgtggaccgacacgcactacgtggggctgcaattcccggatccggctcaccccaacaccctgcactgggtcgatgaggccgggaaggtcggagagcagctgccgctggaggaccctgacgtctactgcccctacagcgccatcggcaacgtcacgggagagctggtgtacgcccactacgggcggcccgaagacctgcaggacctgcgggccaggggcgtggatccagtgggccgcctgctgctggtgcgcgtgggggtgatcagcttcgcccagaaggtgaccaatgctcaggacttcggggctcaaggagtgctcatatacccagagccagcggacttctcccaggacccacccaagccaagcctgtccagccagcaggcagtgtatggacatgtgcacctgggaactggagacccctacacacctggcttcccttccttcaatcaaacccagttccctccagttgcatcatcaggccttcccagcatcccagcccagcccatcagtgcagacattgcctcccgcctgctgaggaagctcaaaggccctgtggccccccaagaatggcaggggagcctcctaggctccccttatcacctgggccccgggccacgactgcggctagtggtcaacaatcacaggacctccacccccatcaacaacatcttcggctgcatcgaaggccgctcagagccagatcactacgttgtcatcggggcccagagggatgcatggggcccaggagcagctaaatccgctgtggggacggctatactcctggagctggtgcggaccttttcctccatggtgagcaacggcttccggccccgcagaagtctcctcttcatcagctgggacggtggtgactttggaagcgtgggctccacggagtggctagaaggctacctcagcgtgctgcacctcaaagccgtagtgtacgtgagcctggacaacgcagtgctgggggatgacaagtttcatgccaagaccagcccccttctgacaagtctcattgagagtgtcctgaagcaggtggattctcccaaccacagtgggcagactctctatgaacaggtggtgttcaccaatcccagctgggatgctgaggtgatccggcccctacccatggacagcagtgcctattccttcacggcctttgtgggagtccctgccgtcgagttctcctttatggaggacgaccaggcctacccattcctgcacacaaaggaggacacttatgagaacctgcataaggtgctgcaaggccgcctgcccgccgtggcccaggccgtggcccagctcgcagggcagctcctcatccggctcagccacgatcgcctgctgcccctcgacttcggccgctacggggacgtcgtcctcaggcacatcgggaacctcaacgagttctctggggacctcaaggcccgcgggctgaccctgcagtgggtgtactcggcgcggggggactacatccgggcggcggaaaagctgcggcaggagatctacagctcggaggagagagacgagcgactgacacgcatgtacaacgtgcgcataatgcgggtggagttctacttcctttcccagtacgtgtcgccagccgactccccgttccgccacatcttcatgggccgtggagaccacacgctgggcgccctgctggaccacctgcggctgctgcgctccaacagctccgggacccccggggccacctcctccactggcttccaggagagccgtttccggcgtcagctagccctgctcacctggacgctgcaaggggcagccaatgcgcttagcggggatgtctggaacattgataacaacttctgaggccctggggatcctcacatccccgtcccccagtcaagagctcctctgctcctcgcttgaatgattcagggtcagggaggtggctcagagtccacctctcattgctgatcaatttctcattacccctacacatctctccacggagcccagaccccagcacagatatccacacaccccagccctgcagtgtagctgaccctaatgtgacggtcatactgtcggttaatcagagagtagcatcccttcaatcacagccccttcccctttctggggtcctccatacctagagaccactctgggaggtttgctaggccctgggacctggccagctctgttagtgggagagatcgctggcaccatagccttatggccaacaggtggtctgtggtgaaaggggcgtggagtttcaatatcaataaaccacctgatatcaataagccaaaa

SEQ ID NO: 22879 - DNA, 3197 bp, Homo Sapiens
ccagcacggacatggcctcgcgcggcgcccgcccgggcccgagtcccccgcgccccgctttgtagccccccggcggagaggcggcctcgacggtgcggacggcgcagacggccgggcgggcggcatggaggcggcgcatctgctcccggccgccgacgtgctgcgccacttctcggtgacagccgagggcggcctgagcccggcgcaggtgaccggcgcgcgggagcgctacggccccaacgagctcccgagtgaggaagggaagtccctgtgggagctggtgctggaacagtttgaggacctcctggtgcgcatcctgctgctggctgcccttgtctcctttgtcctggcctggttcgaggagggcgaggagaccacgaccgccttcgtggagcccctggtcatcatgctgatcctcgtggccaacgccattgtgggcgtgtggcaggaacgcaacgccgagagtgccatcgaggccctgaaggagtatgagcctgagatgggcaaggtgatccgctcggaccgcaagggcgtgcagaggatccgtgcccgggacatcgtcccaggggacattgtagaagtggcagtgggggacaaagtgcctgctgacctccgcctcatcgagatcaagtccaccacgctgcgagtggaccagtccatcctgacgggtgaatctgtgtccgtgaccaagcacacagaggccatcccagaccccagagctgtgaaccaggacaagaagaacatgctgttttctggcaccaatatcacatcgggcaaagcggtgggtgtggccgtggccaccggcctgcacacggagctgggcaagatccggagccagatggcggcagtcgagcccgagcggacgccgctgcagcgcaagctggacgagtttggacggcagctgtcccacgccatctctgtgatctgcgtggccgtgtgggtcatcaacatcggccacttcgccgacccggcccacggtggctcctggctgcgtggcgctgtctactacttcaagatcgccgtggccctggcggtggcggccatccccgagggcctcccggctgtcatcactacatgcctggcactgggcacgcggcgcatggcacgcaagaacgccatcgtgcgaagcctgccgtccgtggagaccctgggctgcacctcagtcatctgctccgacaagacgggcacgctcaccaccaatcagatgtctgtctgccggatgttcgtggtagccgaggccgatgcgggctcctgccttttgcacgagttcaccatctcgggtaccacgtatacccccgagggcgaagtgcggcagggggatcagcctgtgcgctgcggccagttcgacgggctggtggagctggcgaccatctgcgccctgtgcaacgactcggctctggactacaacgaggccaagggtgtgtatgagaaggtgggagaggccacggagacagctctgacttgcctggtggagaagatgaacgtgttcgacaccgacctgcaggctctgtcccgggtggagcgagctggcgcctgtaacacggtcatcaagcagctgatgcggaaggagttcaccctggagttctcccgagaccggaaatccatgtccgtgtactgcacgcccacccgccctcaccctactggccagggcagcaagatgtttgtgaagggggctcctgagagtgtgatcgagcgctgtagctcagtccgcgtggggagccgcacagcacccctgacccccacctccagggagcagatcctggcaaagatccgggattggggctcaggctcagacacgctgcgctgcctggcactggccacccgggacgcgcccccaaggaaggaggacatggagctggacgactgcagcaagtttgtgcagtacgagacggacctgaccttcgtgggctgcgtaggcatgctggacccgccgcgacctgaggtggctgcctgcatcacacgctgctaccaggcgggcatccgcgtggtcatgatcacgggggataacaaaggcactgccgtggccatctgccgcaggcttggcatctttggggacacggaagacgtggcgggcaaggcctacacgggccgcgagtttgatgacctcagccccgagcagcagcgccaggcctgccgcaccacccgctgcttcgcccgcgtggagcccgcacacaagtcccgcatcgtggagaacctgcagtcctttaacgagatcactgctatgactggcgatggagtgaacgacgcaccagccctgaagaaagcagagatcggcatcgccatgggctcaggcacggccgtggccaagtcggcggcagagatggtgctgtcagatgacaactttgcctccatcgtggctgcggtggaggagggccgggccatctacagcaacatgaagcaattcatccgctacctcatctcctccaatgttggcgaggtcgtctgcatcttcctcacggcaattctgggcctgcccgaagccctgatccctgtgcagctgctctgggtgaacctggtgacagacggcctacctgccacggctctgggcttcaacccgccagacctggacatcatggagaagctgccccggagcccccgagaagccctcatcagtggctggctcttcttccgatacctggctatcggagtgtacgtaggcctggccacagtggctgccgccacctggtggtttgtgtatgacgccgagggacctcacatcaacttctaccagctgaggaacttcctgaagtgctccgaagacaacccgctctttgccggcatcgactgtgaggtgttcgagtcacgcttccccaccaccatggccttgtccgtgctcgtgaccattgaaatgtgcaatgccctcaacagcgtctcggagaaccagtcgctgctgcggatgccgccctggatgaacccctggctgctggtggctgtggccatgtccatggccctgcacttcctcatcctgctcgtgccgcccctgcctctcattttccaggtgaccccactgagcgggcgccagtgggtggtggtgctccagatatctctgcctgtcatcctgctggatgaggccctcaagtacctgtcccggaaccacatgcacgaaatgagccagaagtgagcgctgggaacagagtggagtctccggtgtgtacctcagactgatggtgcccatgtgttcgcctccgccccccacc

SEQ ID NO: 22880 - DNA, 4080 bp, Homo Sapiens
tttttttttttttttacagctgttcctgctgattgctttttaagctaggctcaagtgtggggccacggaatccttcaggtgcccttcaaatcagacattacatttcagctctcagggctagaatgcttccccctcttatcttgggcaggtctttgaagaagccagtttagccttggtaattttgaatttggccatagtatacggaggagagctaggtagctatcaaaacgcttagacaaacgtatggtaaaatgcagcccagcctgaacctccgcaaaacccccaaacctggagcagcaagtgggcaaaggagtgtgtgtttggggcagggtactgagtcccatatgtaatcaagagacctggagggcccaaggaagtcagtgacacccccacaagctacatatcctccaatggattgtggtggtcatctccggctaccgaagccaccttgcttattcccataggcttacaaacattatgatgcttcacacgagttgtgggtgaagtgaaggaattggaaagtcccggtctaaggccctgcaaaactgctgtctggtaaaaacaagtgactatggcaaggccctgaatgtactacgtatagacttaagtcagtatttgtgcctaacagcaaagcatgccacaagaggctcctcaaaagccgggtaattgatgccattgttttcttgacctagttgaagagtcaaagaagagaaggtgatgcagaaacttctttccagtgaagtgacagatccaagcaaggaacacctgcctgtgaggggagcggtaggggagggggtagattcggcagcactcgggtagtggcagggaccacatattgtcggtgttaaccactgttatcactggcccaggtcgagtgaggacgagtcatttccccactaagcacttggggagtggcagggaccacatattgtcagtgttaaccactgttatgactggcccaggtcgggtgacgacgagccatttccgcactattgtcccttcttcctcactgcacccccagccctgcaccctcagctccaaatacacattctcgttcactcaacgtttgttgacacctagcgtgggccctgtgggatggggtaaaagttcggtgttgggaggagccccggtgacagatttttggttttggtggtggcttttgggcaaggacaggtcagttcataaaagatgacgccccaggtctggatcgaattctcctgggagccagaccaaagcaccttcctggactgcaaagtgtggaagccgccgcgggccgggcgcggggaggtgtcatgcgccggaacctgcgcttggggccaagctctggagctgacgcgcaggggcaaggcgccccgcgtcccggactggcggctccgcgcatgctcctcccaccggcgtcgcaggcctcgagaggctccggaagtactgggtgcagcctgatggcgcaggaggtagacacggcacagggcgccgagatgcggcggggcgcgggcgcggctcggggacgcgcttcctggtgctgggccctggcgctgctttggctcgcggtggttccgggctggtcccgggtctcgggcatcccctcccggcgccactggccggtgccctacaagcgctttgacttccgtccaaaacctgatccttattgtcaagctaagtatactttctgtccaactggctcacctatcccagttatggagggtgatgatgacattgaagtttttcgattacaagccccagtatgggaatttaaatatggagacctcctgggacacttgaaaattatgcatgatgccattggattcagaagtacattaactggcaagaactacacaatggaatggtatgaacttttccaacttggcaactgtacatttccccatctccgacctgaaatggatgcccctttctggtgtaatcaaggcgctgcctgcttttttgagggaattgatgatgttcactggaaggaaaatgggacattagttcaagtagcaactatatcaggaaacatgttcaaccaaatggcaaagtgggtgaaacaggacaatgaaacaggaatttattatgagacatggaatgtaaaagccagcccagaaaagggggcagagacatggtttgattcctacgactgttccaaatttgtgttaaggacctttaacaagttggctgaatttggagcagagttcaagaacatagaaaccaactatacaagaatatttctttacagtggagaacctacttatctgggaaatgaaacatctgtttttgggccaacaggaaacaagactcttggtttagccataaaaagattttattaccccttcaaaccacatttgccaactaaagaatttctgttgagtctcttgcaaatttttgatgcagtgattgtgcacaaacagttctatttgttttataattttgaatattggtttttacctatgaaattcccttttattaaaataacatatgaagaaatccctttacctatcagaaacaaaacactctctggtttataaaacaccttaattctactgctcttttttctccaatcaccagcatctgtttttcagggggtgattttacttttgtgaattccttagcctttcttccttggtgcataaagttaaaatgcacatcagcagaattgctgcatattaacatctcaggactcttctcttgtaaagaagctgaaattcgtactatattggccaaagtgagcgagttaggtgatcttggtttcaatttccgagcctttgttaatatggagaattatggttcatatcagttatgtaggacctttggacccagggtcctacagatagatatggtgtgcccagattttaaaaataccttcaaaaataaaaaatacattcagtgacattttcatggtgggagctcttctttctgatatggcagttacactttttcacttaagtgctttagtttagactaactttacaacttctataacttttggaaccaagtttagtatagtctgattacattccattcacctaactttagacattcgtttagacaccataactggagtgattgtgcttctagatgtggcaaatccagtgttaacacatatttctggctgagattttggaactagctagtaactggcttgtgttctttaagcatactaacatcactaaatcttaggatttaggattgctgtaaagatgtaagttgtgtatgtttggcaggtcacattgaatggcagtgataatgattaatcaaagaacaaatgtcatccttgatcttgcctaatgtagtttatgtgccaaactttccagggttttgtagtcacctagattttaagctgatagcatagtgcttcagcggttcttctaaccggggtatgcaggaacatggctgcagacacgtttgggtaaacaggcaccttctgacttcttcattgtttcctgtagttctccctcttcccacaaagctgtcagcgcagtggaagaggttgcacttctccgagagaggacaggtttctgttaagatcaccaagtagctgtgctttaattagagccagacaagctttcaaggtcctttaagtatttgatgatcaactgaacacgtttctattcaaggagaaaacaccattcagtaagaagatggagtagatatcagataaaacaattcacgtttaatatgtaaatgtaccaattatgtgattcagtttcaactttcaagtacttcctgagaggttagtacattattattgagctctcacagaaagcttaatcatagatataattaacctgatccaaatgagtaaagtggaccttagaaaggctaagtgatctttctctggctatccagctagtagtaatgaagtcaggtcttgaaccccggttctgctgactgaattggatgcactatagtacaggcttttagcaccgaagtgtggtcctcagaccagtgcctgccaaccagatgttactggtctgtgaggaaataagtacagatactgacaggaagcttttataaacaatttattggagtgtttttgtttctgttgggtctaattaaaaaaattggagcttgtaaaaaaaaaaaaaaaaa

SEQ ID NO: 22881 - DNA, 816 bp, Homo Sapiens
ccctgtacaatttgatagtcattcgtaatcagcaggccaaagactcagaggagtggcagaagctcaactatgatatccataccctgcggcaggttcgaagggaagtaagaaacagatggaagtgcatcttagaagatttaggttttcaaaaggaagctgactctttgttgtcagtgactaaactcagcaccatcagtgattctaaaaacacaaggaaagctcgagagatgttgttaaaactggctgaagaaaccaatattctcccaacaagttgggagctctcagagagatatctctttgttgtggaccgtctcattgcacttgatgctgcagaagagttctttaagcttgctcgtcgaacttaccccaagaagcctggggttccatgcctggcagatggccagaaagaactgcactaccttccgtttccaagtccctaaaggagaggctcaggggcagaatgggaatccttccatgaggactcagcagtcaaccaaagttggacaattacatgtagaagagagtgagcaaatagagtttgcttagtaaaaaatgatactgaattctacataaatgtaaagtctttaatctgaggaccctgccccatgaattgtgcaggctgcattgaaacgccttggtgatctcatatttaggaagaaagttaaagagttggtcagatggatagttcataatgggtggttccattctgagagcccattgccccagctttggttttagttgtgtcataatctctgatcattaatcctactgactgagtggactatttcagttaataaaacaatatgattaataaaa

SEQ ID NO: 22882 - DNA, 35331 bp, Homo Sapiens
gatcacgaggtcaggagatcgagaccatcctggctaacatggtgaaatcccgtctctgctaaaaacataaaaaattagccgggcatggtggcaggcgcctgtagtcccagctactcaggaggctgaggcaggagaatggcatgaacccgggaggtggagactgcagtgagccgagatcacaccactgcactccagcctgggcgacagagaaagactccgtctcaaaaaaaaaaaaaaaaaaaaagaattattgaacacctactaatgctaagtgtaacactgtatgggagattaagttctaccagagatgctgccagtctgaataggtaaatagcattaaataccatttcacaatgtagaaactaaaggtagttaaatagatacagctaaagtactatagaaggtcagacctatcagagatcaggttcagatttgggggaagaacgcaagcaaaccttacagcattttatataggttttgttgattattctttttagtcatggtaaaatatacttaacataaaatttaccatatttaaatatagttagttgagtggttaagaacaatcacattgttgtacaactatcataatcatctatctctagaactttttcatcttcccaaatggaaactctgtatccttaaacagtaacttccattctccccaccgccccgcccctgacaaccaccattcttctatctctatgaatctgattgctctaagtacctaacttatgtaagtggaatcatacaatgttcatcctttgtgactggcttatttcacatcgcataatgcttttaagattcatccatgttgtagcatgtgtcagaattttcttcctttttggatgagttcatgccctttgtagggacatggatgaagctggaaaccatcattctgagcaaactatcacaaggacagaaaaccaaagactgcatgttctcactcataggtggggattgaacaatgagaacacttggacacagggtggggaacatcacaccccggggcctgtcgtggggtgggggaggggggaggaatagcattaggagatattcctaatgtaaatgacgagttaatggtgcagcacaccaacatggcacatgtatacatatgtaacaaagttgcacgttgtgcacatgtaccctagaacttaaagtataataataattaaaaaaaagagagaagtagctaaagtagacatatcctgatccaaaattttaaaaatagattaaaatccgcctctggtttatgatctcttcaaaaaaaaaaaaagaaaatattgagttcctttaagtgaattgacagtagtggtgttttgtttaatacgtaatatacttaagctatattttcaatttttttattattttcctgatgcttttaaacaaaaacacaaattcctacgtcataaagcatggtccattggcaaatggaaagcaataagcaagtgacagtgaagaagctattgaaaagaacaaggacatgggccagccccgggctgaatcccagcctggcccacactgtctatgtgaccttaggcagtgactcagttctctaagaccaggtttcctcttctggaaaagcagtatttgcaaaatcccatgagaaatcgacaagataataatatttgcaaagaatccacactgctccgggcaccataaatagtaacagtagcatgtaacaataacattcatctcagaaaaatgtggcatcagcaaagaactggaaatgcttgttttcagggttaaaaaaataccattagggtttcttcactaaataaactagtaattttagtggcccaatctggaggcctgtggtttaaaaaaaaaaaaaaaagaattttcttccttttcaaggctgaacagtattctttggtatgtatataccacattttgtttatccatttatccttcaatggacatttgggttgtttccaccttttggctattttgactaatgctgcagacattacttttaaatatatctcagttccattcacttctgtccatcttcatcgctactgtgaaagctgattatatgaattgggtcattcttgtcatacccaactaaaacagagtcaagaagccagggggggaaaatcactcagggcacataacattgctccaaaaatataattctctgcaagcctggctgctgaaactgcgtgctgtaacctgaaagcagttttatctcatggctactgaaacagcctgctgcaacttttacctactacgaccactcaacaataagagcttgccacctccccaaaaatcttactagtgccaatgtactgtctcaaagagcaatgtgtagtatttctatttttaaataaaacctctaaatttctctttgttctttggacatactgaagaacacctggtctgcctgtatactccaaattgcaattctttcttcccaaattaaaagttttaatctcagagatttgtctctatattttatttgacgtcagtgctacctccttattccaggttaccatcaactcacacatgaactagtacaacaaacttctaaccataaaatatctaattttaaaatactaaatataagaatattaaatatctaatattggatctaaatgcatttgaagcatcatacctagtaaattatgaaattacaaaaacttcagaaaattcaactccatcatcttatttatttatacctgcctcttcaaggataggtcaatttcactgattgaaagtaagagacagctaaaccctcatgtgccattcatacaagtccctatttaaacttccccatttaaaagttatcaacaagtgtaagttgacaatttgattatttccaaaaacatagtatctcagtaaatatatgctaggtctaacagtgttgagcctatcattttattgagagtaaatataacgaacatattcacattttataacttgttgagtccagtgatgtttttaatccagccagtttaacctaatcagctgccaactcatataggatgggtgctttaaaaatttctttattgacaaatgacgcttttttaggcataaagtaaatatcacgcatcatttattaaatggggaaaggcaaaattttttttacatattatgaatatgtgaacttatatgggtagagagcagaattggataagcttttttctttccaggttttcttgggtggtggggcagggagggatttgctggggataggggaggatgtggatggaatttgttgacagttttcatcttgcagtttttcttttttttatttttattttttattaatatactttaagttttagggtacatgtgcacaatgtgcaggtttgttacatatgtatacatgtgccatgttggtgtgctgcacccattaactcatcatttagcattaagtatatctcccaatgctatccctcccccctccccccaccccacaacaggccccagtgtgtgatgttccccttcctgtgtccatgtgttctcattgttcaattcccacctatgagtgagaacatgcggtgtttggttttttgtccttgtgatagtttgctaagaatgatggtttccagcttcatccatgtccctacaaagaaatgaactcatccttttttatggctgcatagtattccatagtgtatatgtgccacattttcttcatccagtctatcattgttggacatttgggttggttccaagtctttgctattgtgaatagtgccgcaataaacatacatgcgcatgtgtctttatagcagcatcatttataatcctttgggtatatacccagtaatgggattgctgggtcaaatggtatttctagttctagatccctgaggaatcgccacactgacttccacaatggttgaactagtttccagtcccaccaacagtgtaaaagtgttcctatttctccacatcctctccagcacctgttgtttcctgactttttaatgattgccattctaactggtgtgagatggtatcccattgtggttttgatttgcatttctctgatggccagtgatgatgagcattttttcatatgtcttttggctgcataaatgtcttcttttgagaagtgtctgttcatatcctttgcccactttttgatggggttgtttgtttttttcttgtcaatttgtttgagttcattgtagattctggatattagccctttgtcagatgagtagattgcaaaaattttctcccattctgtaggttgcctgttcgccctgatggtagtttcttttgctgtgcagaagctctttagtttaattagatcccatttgtctgttttggcttttgttgccattgcttttggtgttttagacatgaagtccttgcccatgcctatgtcctgaatggtattgcctaggttttcttctagggtttttatggttttaggtctaacatgtaagtctttaatccatcttgaattaatttttgtataaggtgtaaggaagggatccagtttcagctttctacatatggctagccagttttcccagcaccatttattaaatagggaatccttccccattgcttgtttttgtcaggtttgtcaaagatcagatggttgtagatatacagcattatttctgagggctctgttctgttccattgatctatatctctgttttggtaccagtaccatgctgttttggttactgtagccttgtagtatagtttgaagtcaggtagcgtgatgcttccagttttgttcttttggcttaggattgacttggcaatgcgggctcttttttggttccatatgaactttctcaatagatgcagaaaaggcctttgacaaaattcaacaacccttcatgctaaaaactctcaataaattaggtattgatgggatgtatctcaaaataataagagctatctatgacaaacccacagccagtatcatactgaatggacaaaaactggaagcattcccactggaagcattccctttgaaaactggcacaagacagggatgccctctctcaccactcctattcaacatagtgttggaagttctggccagggcaatcaggcaggagaaggaaataaagggcattcaattaggaaaagaggaagttaaattgtccctgtttgcagatgacatgattgtatatctagaaaaccccattgtctcagcccaaaatctccttaagctgataggcaacttcagcaaagtctcagaatacaaaagcaatgtgtaaaaatcacaagcattcttatacacaaataacagacaaacagagagccaaatcatgagtgaactcccattcacaattgcttcaaagagaataaaatacctaggaatccagcttacaagggatgtgaaggacttcttcaaggagaactacaaaccactgctcaaggaaataaaagaggataaaaacaaatggaagaacattccatgctaatgggtaggaagaatcaatatcgtgaaaatggccatactgcccaaggtaatttatagattcaatgccatccccatcaagctaccaatgactttcttcacagaattggaaaaaactactttaaacagattcactcttttacacttcataaaaacactataaaagtagatattatcagtatcttcatattacagacaaggaaactgaaattcagacaggtgaaataacctcccaaagttcacacagttaataaatggcagaacccagttaatctggctcgagggctgatgttcttaatcactgttcattcttgcagtaacatttagaagaaccaagtaccaggatgagatctcatcttccataaagtcgacggagcaagtaattccagactcttcctcctccctcaacatctacaaaactcactgttcctgaaatgcagtaaacatcttaagacctccctgattttgttgatattgtaccctctgcctggattgcccctttccctgtgctttatccagtaaactcatgcttcataacccatttaaaatatcatctgtgctctgtagtgtttcctgaaataccttagggacttttaaacttttttccttttgctcatattgctttctctgcctgctgaataggggattgagaaagaaaacacattcttctttaccaaaagacaaaaactataaatagttactagctgtattaagatatatgccaggtgtgatggttaatatcgagtgtcaacttgattggattgaaggatgcaaagtattgattttgggtatgtctgtgagggtgttgcccaaaggagattaacatttgagtaagtgggctggggaaggcaaacccacccttaacctgggtgggtatcatctaattggctgccagcaaatataaagcaggcagaaaaacatgaaaaggctagactggcttagcctcccagcctacatccttctcccatgctgcatgcttcctgcccttgaacattggactccaagttcttcagctttgggactcagactggcttcgttgctcctcggcttgcagctggcctattgtgggaccttgtgatcatgtgaattaatactacttaataactcccatatatatatacatgtatatatatacataaatatatatatgtatgtatatgagagttatatataaactcacgtgtgtgtgtgtgtgtgtgtctcctattagttctgtccctctagagaacctgactaatataccaggaccttttttaattctcctaataggaagatattcctactaagcatatagattacttataaaaggaagagtatgagcctgacattgaacattttagctctaattataagtgttattaaacaatgaaataatatttataacactctgaggggtgaaaaactggactttggaattttatacctaaccaaaaatgataagagaattctctgtattactctatgatattttgaaaaatattgattactaaaattgatatgggaagaagttttttaaaaaacgtataaacaaattatcatggaaaccattggaaaagctgtctaagaacaacccagctaccatcaccaaatggtattagggcaaataattatattggctggtattaccaaaacttacaagaacagatgtgttatttaaattaaaatggaaactatagaccaatcttacatgaagaagaaaccacagcacgtctgggacatagctatcatgctactctctgagtttcattccagaatgtgggtaagggatatagctaatgaaggagagagatgctgatagtgagaccaacccttcaggaagtaacccaacaaagcctgtatgtcttccttaatccccactcatcacaagtggttgagactatcgttaactggacaaccttttacagagatattggataaaatgtaggaaaaaatctttaaaagatccatatcctttggtcgaataatcccattactaaaaatcaatactaatatttgtggtgatggttgcacagttctgtaaatatactaataatcattgaattacacatttaaaatgggtgagttttatggtttataaataaacttttagaaaatctatgctaagaaaataacctaagatgcagagaaaactttaagtaccatgatgtctactgcagtgcaactgcaaagtaaaaagttgaaactcctaagtcaccgaagtctattcaatcaaacattgtctgaatagttacttattgtcaggttgacactggggttgcagaaatgaatcagacctagactctgattccagaggaattcccacatgggtaggaagtcagccaagacacagaacaaatcaatgcagagagagagaggggactatgtagagaagggccaggaaagtgtttcctttggacacgctacatgagcatatgggactgaaacttacttctccctccagactacattgcctcataaaaaggtgagaatcacacaaccaccacccaaagagaaaatgagacattttcctctaaaggagaggagatatcaggcacaaccacagccacctacactcacgggctcagctggaccaggaatagtacagagaggcaccacctaagtatccttcccaatgacctgggaagtcccacacactttcctccattagggcacttcgagtttttctctacctcacctcagaggtttgttaacctcagtagattttattcttccagttccttttctgggtacaggcagaacagagtagaaagaacggaggaaatgcatctgaatgcaacaggcatttctgacagcccccctagtcaatggttccagattcctgtcagcaagttgctcaaggtctgatgtgggaggaagacataagacaaggtgccagtagtacagtgtgataaattctgagagagaagatgtgggggcccagaagagggaacaagatccagtgtgggggtttaaaagggcctcccagaagtgatgacctttgagctcacttttcaaagtgacaaatggttagccagctaaagagttggaggtcaaggttattgcagctgcatttgaaataccttctagaagaactggaattaatctttagttttaaaaatggttaaatacaccatgctatacccatactctccaatttacatgccactgcatctccactacctagcaccacacctgacatgctataggcactcaataaacatttgttgaattaataaattaatccagatgaagcagcaaatatcacagaaaaggagttaatattaatattattcaaagttcttctcatctcatcctcacaataatccaatagggtaggttctatgactgtcccattttatatatgagagatctggagataagtgaaccaaatagctaaggtgttggtgacttggtgacttgggtgagtctgactccagagtgcatgcttttagtccactatattttactgccaacccacccccaaaatgggcaaaaagtagaccactcagaagagaaatagacaactgataaagaaacatgaaaagacacccaatctcattaataatgaaagaaaagcaaatcaaagcaacactgatataccatttttagtgcctataagattaacaaatattttaaaaattgaaaataacaaatggtattggtgagtttgtgagaaaatagatacacatttactcttatacaccactgggtggggaggggtgtataacacatgtataggacaaattggcagtatcaaaaactttaaatgtctattacctttagatccaggaatgcttatattttaggatgccaccctctaaaaaaatgctctcacaaatgccaaaagatgttcattgcaacattaatcataatggagggggaaaatccttgggaataacctaaatttatatcaataagggagtgtttaaataaattacagtgcattcagattttgtaacctccatggtatattggcatatggttgaatgaaaaacaaacaaaaaaaagaaattgcaaatcaatatgtagactatggtcttatttatgtaaatataatattaatgatgacaatctgctctaaagatgaaattgtctggttataacatggtcctgctgccttaggattgataagggaaggggaaaaagagagtgacaaacggggaagaaaatgaaaaagggaggagaaggtaatagaaaagataagacagagaacttcacatttttaattgtatattatgagaggaagagaagagtgtgggttctgtaactacattgcctaggttcataggcgggctctgtactttctagttgggtaattatcaacaagttacctcacctctctgagcctcagtttcttcatctgtaacatagggataatagtacctatcttttaaggtccttatgtggctaaattaattcatgtaaagcacttagtgaagggtctgcgtgcattgtaagcactcagtcaacagtaggtgttatttatttgggccaggcactgtggtatgcgttttccatacatgatattaccaaattgttacaacaaccggggatctagtctgtggaagctgactgtttgagctcataagcacaacactgtattctaggtctgactccagagccctcccaacttgtgccacagtcacttctgggttttattgccctccttttatagttgaggagatctatagtcagagaggtggttttgctcaaggtatcccagctctatgtggatggtctgattccaaagcccaaatgagctaattttactgtcctatagagagaagaaaatagggaagagccagagctgggggagggggtacactagagggaggggctactttgggttttatctctagcaaggaagggactgagatacctttggggccaatgcagggccaggccggcagaaggcagggtgggtggggctgagtcagaggagaagggataaatgccaggtcctaacccaagtacccacctgtcattcgttcgtcctcagtgcagggcaacaggtaagagctgctttcagcctggtcaccctatctctggtctgccagctggtctctcagggctgtacacactgactctctggtctggtagatctgactttttcctttgtttgtttcttagaatctgtctctttttcattttctttttatctcccatgtctctttctgtctttcctcattttcagcttttttctctctttttcccttcgttactttcttttgttagttttcaagatcattcatttcatttcatcattctctgacactcttgctttctcttatttttccctctgaattctaactatctttttctctaaatttctttctctccccctttttgtctctttcctcggctttgtatctctccgtctctgtgtttctgtctctctcttcctctctatcaagaacgatggcttaatatttcttcctgcaattccccattcctctctccctttgactccctctacctgctgggctgacagcagagctcagtgggtcagagcccatggggagcctaggggtgggggaagagctagggagggaaactaagaggatgtgggggtgatgggaatgatgaattgggtaaggagagatttggggaattgagagatgaataattagcagaaataagtgaagaaagtggaagaggaatgtagtgtcactatacagaaagtaaacagatttctattctcatcctaattcactgtgagaccctaggcaagtaattcactctctgaaaaaaaggcttggcctgtaatttccaccaccctttctagttttgattttgtgatcttctaaattttcctgtttctaagaatttctgattctctgattacagttatctaaagttctgtatgattctttcatggtgggaaaggggtactaggaagagaagtaaggcctgatgtttccaactcctgaagagaaattaccacttcccttccagacctaattgacttttgcaaagcaggccacaaaaggggtgggggggtggggtacaaggaatgctgcaatgagtgttttctggctgtctgctggggtagagttgcagctggcccttttcacctctgggagtacagattgggtgctgacacaagagaggattttaaagtcgtagggaaaaactttcagtaatgatctgttacttggtctcaaatttcaccatcatctctttggttaaaagtattgttttaagaagatgcctggcaagcattatcacacattaggtacataagttattgaatggtagagtaaatgaatattcaacagtacctgaaattccactgtagttacagatctgttcctttggtaaggcattggtgacaaatggcatatgacctggaaagaggcctatgttagtgcagcagaggagataaatgtctagagtcaggccctcagtcaagaaaaaaaggtagtaatatttgaatcacagatccataatggttaagttaggaatctctggaaacagattgcctaggttcaaatcctgcttctcctatgtactagctttctgatctagacaggttacttaatctttttgggattcagtttccctatcatcacagggttgacatgagaacacggcctggcacagagggctctgtaagtgtttgactatcagaactaggcggaatctatgaaattatctagtccaatgtcagtggagaaacggaagcccagagaggggaattacagagcccaagttcacacaataaattgtaacaggattgggacaagaatcaattctctagcttcccaaacccagcctggtatattcatgtgacttcccttggctgtacgttcattttttctacatgggaaatggagaaaataaaaataataaagtctatcaattaaatataatatttaacacttttttactgtttactctgggataggtactctgctaaatgctttatatggattatcttactgaatcttcacaacattcctgtgatgcagattgtccttgttattaccaacattttccagatataagatgtacagcagggaagtgacttttctaaggtcccaaagctagtgagtggtggagccaggattcaaacccaagtagtttgctctagagcctatactctttataccctaaattgactaaaatgcttccttgattcaattttactcactctagtctcttggtaggtaatgagatggaatagaaacagagcccatggtaactagactacaaggtcatgggtataatgatggccaggcagagtgaggcagagcaaatttcaggaaaggagtaacagaacaagagaaatgagaacaggagcttgaaagaacttgagaattcaacaaattccaagaagtggtctatattttcccaggaccctgagcatatcatggccaaaagccccctagtaatgatgtgtgttaatttctcctgtttttatatacaggaggtaggtcttctccaccatcccaaggcaggactggactttgcctccaatattgggggctttccttcccactacataccccaatgttgttggcattattgttgccagtattgatgttaggggagtttacaggagcctggagccttgtcatctgccttgcctgcacttctgggccatccatttcttaccaccaatagccagggccagctctagccagatgctcagacgtgattccaggaaggggctcctcttctctcccacgccctggtctcagcttggggagtggtcagaccccaatggcgataaactctggcaactttatctgtggtctgcaggctcagccccaagtgctttagctttcacaagcaggcaggggaagggaaacacatatctccagatatgaggtaggcactggatccaattccttacctaccttgtgaagtggccataattacctcacgtttgacagctgatgaaggccaagatccagagaggggaagtgatttgaacaagaacatccaacaatgaaattggagagctggaattttaataagaaaagctaacatttattgaagatttactatgtgccaaaaactatactaaaggcttaacttggattgtttcatttagtccctccaacaacccttctgtcttttccaatttcagggcccacatgccttggccccacataccaacccaggctgctgtgacagcccatgagagggggagaggttgctctgggatggaacaagaaaaagaggttgttttgtgaggtacggggagggtgcttgttctatgagatcaggaagggagggagatgaaggaggttgccatatgagggcagggccatgagctgacctgtccctcaaaacataaggctgagggtgctagtagattctactcagtaactttcttcacagtgtcagtgctttagtcttctcacattctcccatgtctctcccattgtactgtcccttatcttgtctcactttttgactctgtctttccaatttgccctttttctttacatctgtctctccttcttgctctctctagctgtctttctcttggtgtctctcagctctcacccctcttaaccctcatccccctgctttagtcacctctctgtctctatcctttgatcttgtcattttctctactctcttctctctgtccctcagtctctctctcatctccctcaattagggccatgattctcttccctaaacttacttagccttttgcaatttctggcagcatttttttatgtttgtgtctgactgactctctacccctgctggatcctctccactcctgttctcacttctatgaatctttgtataatcctctagactcattgatccctcctcatgtccctttcgtgccccttggtctatctgtctctgcctttatccctgtgtgcactatcaccaccccctttttcttttttcattttctctttctctcgactcaatctctgttttcatctctaccctgctccctttccctctacctttgatctctttttccccctcaatttctgttctcttaactctaccaccaccaccacatctttgttctctctctactttcctccttttatctttcctaaattttcttttcttctggcttttctcctagtcccttctccttcctcaatttcagactctgttcattcatcaatttaccccaaaattcaacaaatatttattgagtgcctgtgtgtcatttgctttctctttttctgatctctttgccccctttctcttctctgtcttggcctctgcctgtttcactaatccatagactatgtctttgtccctgttttccagccccactgggacttgctttcacctcttcctatatctgtgcttatccaagagacaggagcaaattcaaagacagctaatatcaggctggtggtacacattctgtaggacctagggcctacccttccttccggatcccttgatttccttaaactgatacatgtgacctcaagctccttctcccctctggctgatcctgcttaggaaacaccctgggccaagcctcaggagctctactcaatgacatatgtttgcattagcaggctgaatcttcacttggctaagaccaacattcttagaaagattcttggccttaagtattgatcaaagggttagtgggttggcagttctcatcctgccacacaaaaacacatttcagtgatcctcatcatcacagaggtagtcagtgccagaatgtgagtcagaatccaggctttctgacctccagttagaactgtttccttcacccctttgcccagtagtcagtttcctatttcttcctccctcatgttttattggtacatgttaacattgggaaagaagttctttccctggaagggcaataagagcatctcggaggcagcaagttttgggtgggaagctgaagacgaggatcaaaggcttggctttttgccaggccctcatgatggaacctcatctcttccatgtcttctgcaggactttaggttcaagatggtgactgcagccatgctgctacagtgctgcccagtgcttgcccggggccccacaagcctcctaggcaaggtggttaagactcaccagttcctgtttggtattggacgctgtcccatcctggctacccaaggaccaaactgttctcaaatccaccttaaggcaacaaaggctggaggaggtaagaagaggctgctagcaaaaggggagaatgttagggtcctggggtaaaagttccaagttatactggccatctttgcctaataattaggacggttcatgtgaaaagtgtcaagatagcatgaactggccccaaaatatacccagaatctgtcttctgccaggttctctagaaagagtctcattctcggccaggcacagtggctcacgcctgtaatcccagcactttgggaggccgaggcgagtggatcacgaggtcaggagttcaagaccaccctggccaagatggtgaaatcccatatctactaaaaataaaaaaattagccaggagtggtggtgggcgcctgtaatcccagctgcttgggaggctgaggcagagaattgcttgaacccaggaggcggaggttgcagtgagccaagatcatgccactgcactccagcctgggcaacagagcgagaatctgtcaaagaaaagaaaagaaaagaaaagaaacagtctcactgtcatgtccctcacacactatactccagacatgctgaaactacttaaaattgcctaaatcaactattctgtcaagagtttgtgcctttgctcctgtcagattaccctctcctagaccctgtactggagaatctcatacttctcatttgacactaagcttggccatcatctcctctgcaaagcctgcttagacctccaaactgtctaattccaattctggctcatttcccctccctcttctggacttctgtagcccatgtacttcctctatcccagcactgttcacaatgtgtcttcagtgtatgccattcccaccagtttagtagctcccctagcacagggaccagactcatctatctctgtgtctctacaatagcctgagatagggctttaggggtacattagatctcagcaattattgttgagctgaacttatgactagaaatgcaccccaaattactctcttacctttgcatagattctccatcttgggcgaagggccactgtcccttcatgctgtcggaactccaggatgggaagagcaagattgtgcagaaggcagccccagaagtccaggaagatgtgaaggctttcaagacaggttggagtcaagttccaccttatgcaacctttactcctaatgcttgaacacactacgtcacagtcctgagctaggctaatacaaaagcagccagtacacatcccatgatgagaagtccagtctttccaggggagccatggtaggcaacagtttaggctgtatgctgaagcacaccatacctgacaaacacatatgtacgggctcctgaaacttttagtcattattctaagatgagccctctagaattttgactcctctttttcaggtggctaaactgatcccaacaggctggggtcccacatttcagcaagaccactctatgagaatatggatttgcatgaaagagaaagagctgggagtaggtacctcctttaaccagggtgcagatccccaggtcaacttaattagtgcagaccacccaagataatcacccttgagatatggccacactgttgacatctttcataggcccctttgggatatcattaaggacaaaaacttcaaaattgaaatttaatgatgtttagaaaagaagagtaaggtacattatcctgcatctactttctaaatgcaggacccagggtggctgctccagttacctgagccaagggaaaatcctagtggagagaagtatgattcaccttatagaaggtttcctaacaatgtaatagtctccattcggggggataaatagaagctcaccttggagaagatttcttctcgctgtagaagctgcccttaccttataaacttgaattttcatgtgttgcattgagcttaaagaggacaacacatgctttctttttcccccattctcttcacggccaatgaatctcacattccgtctcagatctgcctagctccctggtctcagtcagcctaaggaagccattttccggtccccaggagcaggagcagatctctgggaaggtcacacacctgattcagaacaatatgcctggtgagtttgctgaggtggaaaaaaaggggaccggaatagggaaggcattctgaaagggcctctgtcacagtaggggaaacagtacagaagggccttggaaccaaaggaaatttgagtttaaaatttaatgctggcacttgctggatctaggtgttttggcaagtaagacactttccttcagtggcatttaatacctacctcaataggttaccatgagaagaaagtgaaattacatttatggaagtgtttctaatgaggcttcattaaatatttttcaacatatacaggaaagtataaggagggaaatttaagtcatgcagagttccaccattaagtttttgttatattttctcccagatatttttctatggctacacacacacacacacacacacacacacacacaccctctgctctcttcaccacacccatgcttttgttagaagtgtgatcttattttacctggagttcgttatgctgttttgttcacttaaaaatatgtcatgggtatagtatggattcaatatcattcagttaatcaagcatctataatttaagttgtttccaattttttgtattctctcagtttagattgtaggttggttttacatacatacaaatgtactcaaagaaaatgtatagtattacttttttcaatttttatttttacctaataatatcttgctatatattttactctgtgcccttttttcactcaacaatatactgtggaaatgcttccactttaacacatatgtatctaccttatttttcaatgcttcaaaatattttgtagtatagatataatagagattatttggctactcctctatttggttgcttccaattttttctattacaaacagtggtgcaacaaacatccttgaatgtatctccttgtgtacacaggcaagtgtttctccaggataaacactcagtggtggaaattcttgggatgtaaggatgtgtacatttttgatattaatacattttgtcaattagccctccaacatggctgtaccagttatcaaggagggtatccatagtctcattcccttaccagcccttgatattatcaaactttaaatctttatcaattgataggtgaaattttgttttcccagttttatttttcctgattaagaatctttttctacatttattgaattgtctgttcatattctatgcccatttttctactgagttgaaatttttcatgttaatttttcagagattatataataaattctgagtatcaatcatttgtctgttaagtatgctgcaaatatttctctagatatgtcagtatgtgcatttaaaaaacttttgatatgtatttccaaacatctctgcagcaaggatgttaccagtttgcacctccagcagccatataaattgctgtctgcaacatgatttctgtctcacgtaaagagttctagagtttaacaagctctttggcaaacgttatttcaatttatcctagaaataaagttaccccattttgtagtggtaatggttaaagaagtgggctctgagttacttacttgatgaacacttacttgctgcatgaccctggtcaagttgtctaacacttaatgccccagttccctcatctgtaaaatggagatactaatagaactgtccatggagcattgttgtgaggaataaattaaatatttataaagtcctaggaaagaacttacatgtactaggcattcattaaatgttagctataatgatgtaattgaatattagctatctttattagtattattatgactactaatactatagcagtaataatactactattaccatgtgccatttattagtttgaatatattacatgttgttggttgtcagatgctcacaactctccaaggaaagtattattagcctcattctacaaataaagaaatttaaagtaagaaagaagattcatgacttgttcaaggccacacagctaggaagtggcaaagagatcgctagaaacaagatctgttgatactccttccagtgagactgaaagcagtgattctagtaaggaggctgccacaccaacccgggaagagagatgaggccataagaaagtctaaatgaatgtgtgaatgaactactgagtgaatgagtgaatgagtaagcaaaaggatggctgaatgaagtagtagagagttaatgtggtccataagtcaatgactgagcaaataaatgaatatgtggaaaaagagttggagaactcaaaatcagcaacatgggtaaaatacagactagccagggagagacttaaaacgaattcttttcatcctcatatctgctcctgcaggaaactatgtcttcagttatgaccagtttttcagggacaagatcatggagaagaaacaggatcacacctaccgtgtgttcaagactgtgaaccgctgggctgatgcatatccctttgcccaacatttctctgaggcatctgtggcctcaaaggatgtgtccgtctggtgtagtaatgattacctgggcatgagccgacaccctcaggtcttgcaagccacacagtgagtagtaggctttcagccatcagcagtggccagaggagatgaaaaaccacacatggaaaaaaaaaaaaaggcagagctggcagtggaaacttgggttctatcaccacttcttttgtccaaggtcctccatcatatctattccttggatatgaaataagtcaacacaccatgtttcccaaactcttcggtgtccaatgctatggaggggaaggatgggagaccaagcaaggcccactctgcctgagtttttaatctagctgcagaattagtattgccagagatggagtgtgacttcctctaggtcttccaaactactcaagctcaacctagcttctccctctctccctgagtacctccagtcctagaaggaaggcacatgtctccctatcctccccatccttccctctactttgtctcataggacacagtttatataggatcactaactcaacattgactcccatcaaggaagagaaacctacccagttcctcgatgcctgacaagagtttctttttctccttttctcctgttttctcctggccagggagaccctgcagcgtcatggtgctggagctggtggcacccgcaacatctcaggcaccagtaagtttcatgtggagcttgagcaggagctggctgagctgcaccagaaggactcagccctgctcttctcctcctgctttgttgccaatgactctactctcttcaccttggccaagatcctgccaggtaagcctgaggcctgagctttgttcagggctggtatcctgcaatacagcatccagtttcactggttccatcactccttccctgtatttggagttccctcactcccattgttcttccttcttatccaccttgcatatcctcaacactggataattatatccctctgctttctctccttctgcacgtagagaggaccattaccggggaacattaccccacctcacaggaaggaaacactataaattcatcacctcccaactcaactgagctcttaacacacatacatagttattttatgtctccacaggagctttttcaaacttcttctcctcttctaaaacctctgactaccttctcctccacacttagcaaataacctcacatcttacttcacaataaaaacagaagccccagacagagaatccttatttattgccaccaaacctacgaacttatctaattgtttatctagccttgcctcattctttccttttacaatggaaggcatatctctccttctgcctaaaaccaatcccttcacttgtacactggttcccatattcccagtctcctactctctagtctgtaatgtcctcacctcatacgccttgttgtccttccgccaaggcccaatccagaatgaatacaaccctccatcttcactatatcaattccgggctcatacagttgctcagacaggagtcactaaaaattcatactcttaacctctactgggttctccatggtctctgacaatcccatttccctggtcagttctcgaagtttatggggcagttttgccaaaccaccattatcctcagccttcccacaccccctcctccccatctccctcagcagacaacttcatgttctactacattcaaaatagaagataccagacagcaatgtccttgactcccagccacaaagcacctacaaactcataagcatcttcaaatgtcctctcctcactccttctcttctgtcatagtggaagaagtatccttttttcttgtgactaatccttccactgttgctctgtgccccattcccctctaccaccttaggaatcttgacctattggctctctcctcctctcctgtatcttcagcctctccctctctttaaacatgttttcaagtctcttgtatcttataaaaaaacattgcctcaacccctgatcactctctagctactgccctctttcctccctataacaggcaaactgcttgagagaagtcttcgctcttactatctacttcctcacctcctgctgattcttcagcacagcaaaaatattaccaccacttctcagaaactttttttgagtccacccataagccccaactaaactcaacatctttaagttgtttttagtccatcccctcctcaaccattaaacttctttccatctctactgccagcatcctagcctgatccaacatcattttttaaagaaaattttacctttgccctccgataatctattctttacaacagtcagaattttttttaatgcaaaactatctttgtcaccccaccctcagccctggtcaaaaccctttagtggacccccattcccccaggaccaaatccaaatttcttatcacagcttctaaagttctcaataatctggcttctatgtatctcttcggtctcacctttttgcatccctcctctcactatttcattcagtaatacattcattcatatactcattcacttacttataaatctgtcatcagtttatttatccattcatttaataaatgtttacttagcatctactgtgtgcttactcttatactggacaccagagacagagagataataagatgtttttgctcccatgcaactcccagtctgcttgtctttcaagccattttctccagaaagccattactcattttctcaggtggaagttatcccttaatcttataataaggccacagttccttgatggcagtgcagttggtggcaggggttggggaggtccaggaatcaactccctctaccaatttcacatgcccacctgccccaccaggattgcccagtaaaaagccctgcattcttcaaatctttctggaccttagctttctcacttgtatagtaaagggatgaatcccatgatcactaacagccctgccagctctgacatgccataagcttatgattccaacagtaaaagcctgataaatatccatccctgtaaccacaagcagatgctacctggaatggatggaatttcatctagactaggaacaatctagcatcagtccgagtcaacaaacattccctggggtaatccctttttcaagtcttgatcttatatattggggagaaggaaaataggtcccgtcctcaaaaaactctgaagcttcttgggaaattaaatgttcttccaccccaaggcagtcagaggctagaccagggttacaaatgactggagggaaggatgtaggggtcagaatttgggaacagtgaagtccttccaagggagaaagaagtgtacaaaagttcccagagaaggaagaagcagagcaaggtcttcaaagggaagaaagggttggcccttttctttgccaggtcaaacctgaaggttgaagtgggagtactgggacagaagcttaaggattatacatctgcttcctcagggtgcgagatttactcagacgcaggcaaccatgcttccatgatccaaggtatccgtaacagtggagcagccaagtttgtcttcaggcacaatgaccctgaccacctaaagaaacttctagagaagtctaaccctaagatacccaaaattgtggcctttgagactgtccactccatggatggtatgtatatgagtgagtgtatgtttactagtgttggtctcacaaaaaaccatgatgatcatgatgatgatgatgacgataacattataacagctaatatttatagtgtttattatgtgccaagcaaaattattagtattttacatgtattaattcatttaattttctgaacaattctatgtgataggtgttattattattttgattttttacatgaggaaactgagacataagagtaatttgtccaaggtcacacagctagtaaatgccaaagaatggaggcagctattacattcatcttataggtaaagaaactaaagttcagagttggcatccaattcatcttgagtggctcagcaagttggtgctaaagtgagtatctgcaccctaacacatataactccaattcctcgagtaacacttctcttgttagaaatgatatgtaaatcaataatcccagtgtttggtttttatgaaggaaatttcaaaaaccattgcctaggatttttttcaaggtccagtatgaagcattggggtcaaaacaggttttcaagtcagagagacctgggttcaaatcccacctttgacagttactggctatgaccatgggtaactctttaactgtctaagcctcaattttcccaaaggtaaaatatctggttgtaagaattagagatgatagaaaccattctagttattatgctttagtagaattaaatgatcttcacactcctacctcctttctttgctcaattgaaacaatgtccaaagctttctattgctggccctgttgtgtagaaatcatgtgttttaggcatcctcttcatggatttatttaagggaagaggtcctcaactcatttcagtttgtcccttttccaactgaaacaaaagagtccatagtattccctgatttaggtatcttaagtggcatgtaatgactatacacacaggctctaaaaccagactatccatgttcaaatcctagcatgaccatttactagcttgggcaagcttcttaattgctctgtgtctcagttctcagttgcttatttgaaaaatgtaagtgataataattaaataggtatgcaaattaaatgagttaatatatgtaagaaacttactattatgcccactcccacatttctaacactagcaataaagtaaaactatcctatcccttttgtatatttctaccactgagactattcaaattcattatttctctagtggaaactatgttggtaccattctacctcgttacatttgcaaataaatagttatttacctatttttggggtgcaaactctgcccaaactgttgatccttaggctgaatctctcccattgaaatgatgctaggctgaacacagcagaaacaggaaaatagacattgtcagaatgaagtaaaaacagaaagacaaagagtcaagccttgatcccaggctggggaacacacacacatgcgcacacacacgtacacacacacacacacacacacacacacacacacacacacacacacagagagacagagagagagagagagaaggcagggatgagatacaggcaatcgatccatacacagaggtttgtaatagttctaaatgaaggcgcacatcctccttcctctctacaacacccttttccaacccaaagtaggcatgtatgggaaattccacattggagatggagctggggaagggttatgatgtcctacctctatcccttggctttgctcaggtgccatctgtcccctcgaggagttgtgtgatgtgtcccaccagtatggggccctgaccttcgtggatgaggtccatgctgtaggactgtatgggtcccggggcgctgggattggggagcgtgatggaattatgcataagattgacatcatctctggaactcttggtaagtgaatgctttgggccttcttatataccctccagagaggaggcccttacaaaattcttttctgcctcctccccaaagctataggggttgtttggacagaattcacagccccaggctgctgccatcctggactccctctctccactcgcatcccactgcagagttgatgagaaagtctggtagagttttttgaaaagaccttgaactaggccaaatagttagattcaacttgagtatgtgaagagctgtgtttctaaacccctcccccaccctagccccaagcttcatcttagctccactcctgaccctatccagctaaaggtccccacccagctactgcctatctagtcattgcatattggcaagacttgaaagtcctatctcaaagcagcagaattatcagctacgactgccttgtcatggacagatgagcagaggcctgggaagacagcctggagccccaacttctggtgcacccccttgtgttatctggcacatgatcctgttgctctgggactgattatgggatctgtgtatatcttattcctttctgtctccaggcaaggcctttggctgtgtgggcggctacattgccagcacccgtgacttggtggacatggtgcgctcctatgctgcaggcttcatctttaccacttctctgccccccatggtgctctctggagctctagaatctgtgcggctgctcaagggagaggagggccaagccctgaggcgagcccaccagcgcaatgtcaagcacatgcgccagctactcatggacaggggccttcctgtcatcccctgccccagccacatcatccccatccgggtgagagccccaccatgcccattgccctctccacctatttattctgggagcctcacgctcccaacaaacctacatctgttgctgtcttcaattatttgctttcctgctaaccattccctttattgccagctttgtttccctttttgaaaaattatcagccattctggattaaccagtcttttccttgcatcagccattacctcatgcttattagattatcctaaccctaacaatagcgagtgctcacagcctataattcagagtttttcaaactggatcaagacaattaatgggtcacaaaatcagcttagtgggttatcattagcattaaaaaaagaaaagaaacagaaaatgttggagtacatcacatactaagggtatcatcaatttgtgaaaaatttgtatgcattttgggtatttgcatatacacatgtatgtgtatgtgtgcgtttatggtcacggtgtaaaacgtacttcttattgagaaatgagggcagaaaaataaaatcaaaagccataggattagctgctactttggatcctcaatatgagcatttactgcctttaaaaatgaactgctacttctttcttaaataacacgtatttgtgtgagtcagtaagccagggcagggaaaggacacttatttgtgacaattttgtggatgagaaatagtcactgctctttagactaacctagtatttcctttaaacactcattttatgaattaatttagtgacagcaccccagaattggcttggcgggggttccagaattggcttggtggggggtatcttctcacccagaaccatcccaaactaagatattagctaagtaaaatcagtgtgcttgctctgcaaacagcttccaaacagggctcctggtaccacctctgctccatccttttcaaaccaaattgctagctctgagctcctccttgatagaaattctggagctgccactaagcccctaatggaaaaaaaaaatctatcccaaaattcagtgatgttccctcatctagttccctccatctgcttaatggagctagtgatggtggagccagagtggcaggtactgattagcctttctcctgagtccaggtgggcaatgcagcactcaacagcaagctctgtgatctcctgctctccaagcatggcatctatgtgcaggccatcaactacccaactgtcccccggggtgaagagctcctgcgcttggcaccctccccccaccacagccctcagatgatggaagattttgtgggtaagttctcaacatgggtgcctacaggacctccctcccctcagccccaggatctgaaagagaagctgagaggacagagaccactgagtttacaaaatatttctggaacatctaatgtgtgccagcacctatactagggtcacaaataaatgagaagcagcccctacacttgtagggctccagtttggttggggataccatagtgaacacaaacaatgacactaagggatgatcaaagctccacaaggcagtgcatgatagagttgtcggagcagagaggaggggcctgactcagcctgagggatgcaagacccacttcctagtagaggtgacacctgagctgagtcttgcaaagtgagtggtattaaaagaaagagggcatggaagaagtattcctaccagagggaagagcatgaagataggtgaggagaatgagaagcagccagggatatatcaagaacaataagcaggtggtattggaatgtagggtcataggaatggagtggggcaggggagtatcaatctatgagtctacaaagacaacatgagatagagactggattgagaggcttgtagagctgagtagtttgagatttaccctgaaaatgccagtttagtcaattcacctaatgtttgttggatttctgttgggtagttttgtttttgtttgtttgtttttgtttttgtttttttgagacagagtctggctctgtagcccaggctggagtgcagtggcacgatcttggctcactgctacctctgcctcccgggtcctggctcaagcaattctcctgcctcagcctcccaagtagctgggattacaggcacgtgccaccatgcctagctaatttctgtatttttagtagagatggggtttcaccatgttggccaggctagtctcgaactcctgacctcgtaatccacctgcctaggcctcccaaagtgctgggattacaggcgtgagccaccatgcccggcctgggtagtttttaatgcagggcctgacattgaataggtgctcattccaggcctgttggatgaaagacatgtaggcagttgatggtctagcagaggagccagatatagatggtactggtccagtatgatgagctccagtattctgggagctagagggagtggacacattatggagagagagggtgggaaggatgaaattggagaggctttgtgagtaaggaagtttttatgatgcatgttgaagtacatgtgaatatgttgtaagaatattccagaataagggaattccacgagcaatgacctagagataggaaagcagtgggtatgtattgacaacataattctgtttgtctgaagcatgggcagtatgagaattcaaggaagacaagctaggtaggcgccattcattcattcaaaaacattaaataatgctggctaacattaagtacttaccatgtgccaagcactgttctaaacactttacacgtattaactcatctaatccccacaacaacctcaagagttagagatcctcttatcatttccattttgtacatgtggaaattgaggcacaaaaatatatagtcgctgatccaaggtcacacagcttctaagttgcaactgggaggtctgtctctacctccatggtcataactgctaggtctaccacctctctgagctgatgacccagactcctgggccttttgttcagtattctcttttgctctgggcttcaattgttgagctctcagtattcttggttctctgaatgtccacctaggctaggcttttgtaagaatatatgaggcatccacgatggctccaccagtccctaagttccatagccaatccatcctgaaatcctgcaaaagttatctataatctctctcaaacctatttgcttttctcccctgccacttctttaatccatgtcaacatgatttttttcctaatttctctgcttctctcttgctcctctcaaatcctttctcgatgatgaccactagagggatttttctaaaattctgactatattgctcccttgcttaaaccccttcatgtttccctctagactctaaagcagtgacctccaaggggtatgcaaaatgattactgggtgaaggaacagaatatgtattagaattttatgtttttttatcttaaaaataggaaatcaagcatcactgatactgatctttaatatacagactgacagttatacatgtatataatatataaacaaatatagagattggaggtacatgctaaaacatttgtactgatagggatgtatagtccaaaatttggaaacattgacatataggacagagttgaagctcttcagcatagcattcaatgccttccacatggtgatctctatgccctcacctcctccccacatgcattttgttttttcagctacactgaaggacttgtcgttccctcatttttttctgctctcttacctctgggactttgctcatgctgctctcttttgattggaatgccctccctcacactttcctctggcttactttccttcatcttgtagacttaacttaggcattctttcaacaaatatttattgagtaccaactgtgtactagatactgttctaggcactggggatgcagtagcaaacaaatcagacacaaaattcctaccctctggagcttacattctagtggaaggggtagtaaaaaaaattaccaaaaataagcaaattaagtagcacattagttctaagtgctatgggaaaaaataaagcaggataaggagaatgggataaggggccagggcgagttcagagaagggttgtagtattagagtggcaagggtagaagacgctgaggtgaaacttgagcaaaaatttgaaggaggtgaagttagtgaggcagatatctaagggaatggcatcgcaggcagagggaacatcctaaggcagggaagacacaggagtattccttttatatttgaggaacagtaagaagatgggtgtgggtggaatggtataagcaagtgggagacagaaaaattgagtacatagaggcaatgtgggaccagattgtatagggtatggtaggccattagaaggagtttggcttttactctgagagcccttgaaaggatttgaacacaggactgatatttctgactcgggttttaacaaaattcctccaacttctatgtagagaatacactaaaagggagcaagggtggaagcagggagacccaagagtgggctacagtaatatcccaggtgagagatgatggtggctcagacttgatcataatgaaggcaataagaagtggtcagattttgaaggtagagccaagggtctttgctgatagatgggatatagggtaagagagaaagagaaaaataaaggatagctctgaaatttttggactgagcaactggaattgccatccactgagatgggaaaagctaaaagtagaatagcttggtggagggtagggacatgagtagctcagttgtactcctaagttagaaatgcatattagacatctaggtggagatggagaaaagccattggatatacaagattggaaaccagtagagtggcgtgagctggagattaaaatttctgaaccatcagcatatagatggtctttaaagtcatgtgactagacaagatcaacaagggcatgaacacagaaaaggccaagaacagagccctggaacgtacctggggtacttcctccagctaggtcaggttcccttctctgggttttcacacccccaggtggaccccctaccccaggtttcctggtcatagcaccaatgacacagtatagttactgtcattatcattgtcctcatagggcttagagttcccaagcagacagtcattcttgggccacagcacatcctatacttagggagtggtccaggccaggacagtatggcttcaaattgtgtcaaaggagagcttccaaatcttttataatatatatcccagcatccagatacaaatggtaatattcacggcacacacagaagcaaacagtaggctacttctggccctgaggtatcttgaagggttgagggggatcaatatcttggctcatctgtactgtgacagatttggaagatctagtctaacccattttttccctcccctccccctaccaccttcagagaagctgctgctggcttggactgcggtggggctgcccctccaggatgtgtctgtggctgcctgcaatttctgtcgccgtcctgtacactttgagctcatgagtgagtgggaacgttcctacttcgggaacatggggccccagtatgtcaccacctatgcctgagaagccagctgcctaggattcacaccccacctgcgcttcacttgggtccaggcctactcctgtcttctgctttgttgtgtgcctctagctgaattgagcctaaaaataaagcacaaaccacagcatgtgaagccttttattggacagggaacagacaagtgcattctgactccctcagacaagtgcagatctatgaggtaaccataggtcacttgttggtcaccattccattttaccaacagggaaacagaatgagaaagaggaaggaaatgcccaaaaactacacagtgagttgcaaagagctaggatacttggcagatttatttgagatggctcttctccaatggtttcaataaaaatccagggattgacgcttcactggtaatccgggccctggaaatctgggcccagggtagcccctgaagccaggaaatgagtcagccctaaccaaattccctagaaaggagtggttccccaaaaccaaagaggtattttccataaggggatatggatgtcttcctcaatccattatcctctctccctcccacggcatcccacagaacaggatttaccagtcccattctttttcttttctttttttttttttggagactgaatttcactcttgttgcccaggctggagtgcaatgcatgatctcagcccactgcaacctccgcctcccaggtacaagctattctcctgtctcagcctcctaagtagcttggattacaggcacgcgccaccacgcccagttaatttttttgtatttagtagagacggggtctcaccatgttaggctggttgcgaactcctgacctcaggtgatccacccatctcagcctcccaaagtgctgggattacaggcgtgcaccactgtgcctggtctaccagtcccattttcaaaggtgagaagaggcttggctagagcaagcactgtgttcaaagcaatgctcccactttccaggtcacagtatacaggaaacatttccatggcacacttaggggtactaatgatactacttgctaaggaggcaatcgtccctgaaacttgtgtggtcccaggccctgcctggcaactctgagggctgaggaccgtttctttcaaccctgtaacccactgtggcagctgtgggacgcactagctggaaagctctggtttaaggctacacagcccaccttccttgctgatttcaccttagccgtacaggaaattcctacaactgagcagagaaccctttatggtgagcactgctgctcacgcctcactattccctcctcccccctccctcctcccctttctctgggaattacatcattgggctacagcagccggcaaaccaagtattgagatagcttctctgactcaactttatggagtacctccacaatgtccaaagtgcaaccctgaaacaaatacacagactttatttatgcacaaatacactttccagcaaagacagaagtgatttaaaatcacacaacttcctggggcagctagtgtccgtgtacttcggacaggaaggtggaaagtggtgtaaggggctgggtcacaggattaaggcacaagaagctcaccaacaaggagctaggtaggaaggaaagcgaggaagagagggcttaaaagaggaagagaagggtaggagactttgagggagaagcaggaggcagctcagggaaggggagctgtcctcagatcatgtgcaggggtgaccatgccagatgtccccaggcctccattggttcagctgggcctgctccagaggaagaagttgcaccgggaggaggggtcagtgggaggaccccggggcctggcacacatgtagaagcggcggcccaagttgggtcctggcttcttcacagtacgcatcacacatggctccctgtggcccccacagaggggtgtgcgcaaggccccgccagcacagacttccagaatgaggtccgtaactccttctcatctttggcttctgaagtcttggcctgccccttcaccactttggccactgccttctcttctggagtcttcggggtcatgagggcgctcatcagtggtaggctaggcagctctatgtcaggagaggcttggggacagctaggggagggctgaaagtagctcttcaggtttttctggcctctgctagagccaacctgactgggctgaggcctggttgagcgcacttgggctttgttttggcatgtctgtacccgggtttgattgttgtgctgcagcgtcgactgctccaacacaggactttgttcgagaggaactaggaagcgaaggatcttgagctgggtgcctgcaaactcagggaggaagcgggtgcacagaggtgggcactgttttgcaggcacagaggacacactcaagactgcacccacagggcagtggtcagagcccatcacctcaggcagcaggaaagaggcctgaaaggtgtctatgaccagggtcctgtcccccagcacatagtcaagccgggagccatagttgagatggcgggcgccagtgactgctgaccagcaggtgaaggccccctcctgctttggttggaagcagcggtagctatcgatgaagggccctacatgagaggcagactggcaccccaagttactgagcaagctgtccatccacttgcgccctgggtcctcttcaaagcattcctaggtgaggaggaaagggggttggaagagagagagacagaactagatacctagaactggaagggacttagactaactgctgcattttgcaaataagaaaatttggttgtcccaagaggactactgctcaaggtcacacagtccggaattggcagagctgggattctgattttcatccttactgatttaaaagaccatgcttgtttttccctctgcacgagcttgcatttgtcttgcattggtccgtcaatggcaaatctgaaagtttgcttactcaaagcaattcctggaactgcttttcaaaaggatggaaaacaggaagttaaaagtgtttgcctctaggaagcagggctggggttaagagttaggaagactgtcagcttcttcctttaaaccctctggcactatttggtttatctagtgtgtcaaagccctcaatgaccattcctacctcctgagctgaggacctgcaaggatccaggtctgaatacttccttaggctctgatccccaatccatcatccatcagtccatccattcaatccacctacccacccactcattcaatgcaagaaatgttcatggaatacctattatgtgccatgcatgatgccagggacaaagtaggaacctgatctactcctggggaccaaggaggcttcctttcgagaagtgatc

SEQ ID NO: 22883 - DNA, 1953 bp, Homo Sapiens
gcggccgccgcggggcgggccgaggctgtgcgtgcgagtctttgtgcggccggcggactggagctcccagtcgggcctgcccgtcccactcgggacatgagctgctgaagttgtccccccgtcagccctcacccctgccaggactcctctgggcttgcagtcgctcccccgtacctctcctggccccctcagttctcccaggttgttcctcaaagtcattcaagctgtactcgccgaaggagcccccgaacggcaacgcctttccccccttccatcccggcaccatgctggatagggatgtgggcccaactcccatgtatccgcctacatacctggagccagggattgggaggcacacaccatatggcaaccaaactgactacagaatatttgagcttaacaaacggcttcagaactggacagaggagtgtgacaatctctggtgggatgcattcacgactgagttctttgaggatgatgccatgttgaccatcactttctgcctggaggatggaccaaagagatataccattggccggaccctgatcccacgctacttccgcagcatctttgaggggggtgctacggagctgtactatgttcttaagcaccccaaggaggcattccacagcaactttgtgtccctcgactgtgaccagggcagcatggtgacccagcatggcaagcccatgttcacccaggtgtgtgtggagggccggttgtacctggagttcatgtttgacgacatgatgcggataaagacgtggcacttcagcatccggcagcaccgagagctcatcccccgcagcatccttgccatgcatgcccaagacccccagatgttggatcagctctccaaaaacatcactcggtgtgggctgtccaattccactctcaactacctccgactctgtgtgatactcgagcccatgcaagagctcatgtcacgccacaagacctacagcctcagcccccgcgactgcctcaagacctgccttttccagaagtggcagcgcatggtagcaccccctgcggagcccacacgtcagcagcccagcaaacggcggaaacggaagatgtcagggggcagcaccatgagctctggtggtggcaacaccaacaacagcaacagcaagaagaagagcccagctagcaccttcgccctctccagccaggtaccggatgtgatggtggtgggggagcccaccctgatgggcggggagttcggggacgaggacgagaggctcatcacccggctggagaacacccagtttgacgcagccaacggcattgacgacgaggacagctttaacaactcccctgcactgggcgccaacagcccctggaacagcaagcctccgtccagccaagaaagcaaatcggagaaccccacgtcacaggcctcccagtaaaaggccctgctgtggccacccagtgctctgcctacctgccccacccctcacagccccagggagcagaagacagaatgaagagactgagcatctaaaatgggcagcctccatccacccgcttcagggaggaactggactctctgggggcaggtgccaagatttgcccccccagtggccctgggctgggcctggcctctacagagccttttagggggagggggtactcatgtggatgcctacttggaacctgggcctctgagacatgtcctgaccaccccccagggcatttgcctccatcttcaccccagattgtgggtttcccatccccctgactttacccctttcaagcctggggttgtctatacccacagcccttagggacttaaagttacggggcttcgttgaatgctccttcccctaggcagctggtaatagaggggtaaagctctgggcccctcctccctgctgccacttatcccagctccaagtttttttaaaaataatattattaaaaatgtaagttaaaaaaaaaaaaaaaaaa

SEQ ID NO: 22884 - DNA, 1749 bp, Homo Sapiens
atgagtagtagtttaggaaaagaaaaagactctaaagaaaaagatcccaaagtaccatcagccaaggaaagagaaaaggaggcaaaagcctctggaggttttgggaaagagagcaaagaaaaagaacctaagaccaaagggaaagatgccaaagatggaaagaaggactccagtgctgcccaaccaggggtggcattttcagttgacaatacgatcaaacggccaaacccagcacctgggactagaaaaaaatccagcaatgcagaggtgattaaagagctcaacaaatgccgggaagagaattcaatgcgtttggacttatccaagagatctatacacatattgccatcatcaatcaaagagttgactcaattaacagaactttatttatacagtaacaaattgcagtccctcccagcagaggtgggatgtttagtaaatctcatgacactggctctaagtgaaaattcacttaccagtttgcctgactctcttgataacttgaagaagctgcggatgcttgatttacggcataataaactgagagaaattccttcagtggtgtataggctggattctctcaccactctttaccttcgctttaatcgtataactactgtggaaaaggacatcaaaaacttgtcaaaactcagcatgcttagcattcgagagaacaaaattaaacaactacctgctgaaattggtgaattatgtaacctcattacgctggatgtagctcacaatcaacttgaacaccttccaaaggagattggaaactgtacacagataaccaaccttgacttgcagcacaatgaactgctagacctcccagatactataggaaacctgtccagtttaagtcgtcttggtctgagatataacagactgtcagcaatacccagatcattagcaaaatgcagtgcacttgaagaattaaatttagagaacaataacatttctactttaccagagagtcttttatcaagtcttgtgaaactgaatagtttgaccttagctagaaattgcttccagttgtatccagtgggtggtccatctcagttttctaccatctattccctcaacatggaacacaatcgaatcaacaaaattccatttggaattttctccagagcaaaagtattaagtaagctgaatatgaaggacaatcagttaacatcacttcccttggattttggaacttggaccagtatggtagaattgaatttagccactaatcagctcacaaagatccctgaggatgtgtctggtctcgtttctcttgaggttcttatcttatcaaacaatcttctaaagaagcttccccatggtcttggaaaccttaggaagttaagagagttggatctagaagagaacaaattggaatccttgccaaatgaaattgcatatcttaaggatttacagaaattagtcttgacaaacaaccagttgaccactcttcccagaggcattggtcaccttactaatctcacacatctgggccttggagagaacctacttactcaccttcctgaagaaattggtacactggagaacctagaagaactgtatttgaatgacaaccccaacctgcatagccttccctttgagctggcactctgcagcaagctttcaatcatgagtattgagaactgtccactcagtcaccttccacctcagattgttgctggggggccttctttcatcattcagttcttaaagatgcagggtccatatcgtgccatggtctga

SEQ ID NO: 22885 - DNA, 2147 bp, Homo Sapiens
ctcgggccctctccccagagcctccccgcgcggaccccgctgcagtgtcggggttctcagcacatttatggaagtttagggcctggacagtggccccgagtccggcctgagagcgcagcctgggctgctggcagggaagaggaagatgtctgtgctcaggcggatgatgcgggtttccaatcgctctctcctcgccttcatcttctttttctccctctcttcgtcctgtctgtacttcatctatgtggccccaggcatcgattatcccgaaggcaataattcaagtgattatcttgttcaaacaacaacgtatctcccggaaaacttcacatactcaccatacctcccctgtccagaaaagctgccttatatgcgaggattcctcaatgtcaatgtaagcgaagtcagttttgatgaaattcatcaactcttctccaaggatttagatattgagccagggggtcattggaggccaaaagactgtaaacccagatggaaggtggcagttctcattcctttccgtaatcgccatgaacatcttccaatttttttcttacatctgattccaatgctccagaagcagcggctggaatttgcgttttatgtcgttgaacagactggcacacaaccttttaaccgtgcgatgcttttcaatgtgggcttcaaagaggccatgaaagacagtgtctgggactgtgtaatcttccacgatgtggatcatctacctgaaaatgaccggaactattacggatgtggagaaatgccacgtcattttgctgcaaagctggataaatacatgtatattcttccatataaagaattttttggtggtgtaagtgggctgacagtggaacaatttagaaagatcaatggttttcctaatgccttctggggatggggaggagaagatgatgacctttggaacagagttcactatgctggatataatgtaaccagaccagagggagacttaggaaaatacaagtcaattcctcatcaccatagaggtgaagtccagtttttaggacggtataaattactaaggtattccaaggagcgtcagtacatcgatggactgaacaatttaatatataggccaaaaatactggttgataggttgtatacaaacatatctgtaaacctcatgccagagttagctccaatcgaagactattaaaagaagtggctgtcgtggcaaggtagaccacaatgctggatcataaacttggagcgcgctcttagtggaggtcagtgattggctgtgtcacagtgcccttttctctgagaagagccagcagtccacagtgtttacagagtgggactatatacagtcacccttctctcaccccgtcctccctgctctgagacacacccctgtggcgagcaccgcagaaacgggaagccactacttaagatcggaagttaagagagctccctccgaagagaaaatttttatactaaaatctataatttaattcaagagaatgcttttatttccgtttaaacatattttgtatatatgtgatataaattaatgtgtgcaaattgtttaaaaattagatgtgttgcagttttgcatgtaatcggttatacctttattggacttttatagacattttttatttgcatgaaaaaaactcactaaatttacatcactaaacaaaggttaacccttgtgtgaaatgaaggaactgtcaataattgacagccaactaatacagtaaactgttatactagttttgagctttagacctcagccttttgtgtggaagaagtcacagctttcttaggctttaaaggaaaagaaggaaggacttaaatagcttttcttcctaccgggattacctatgtttttccttgcttgcaatctcatctgattttgctagaaatcacaaccatattgtttatgcatattgcatgagtattaccaagaaaaatctttaaaagttgtgatgtgacatgatataaaggatctctttatgttaaatgtctttccatgtacctctggtgtgtcagggattttgtgcctcaaaaaatgtttccaaggttgtgtgtttatactgtgtattttttttaaattcacggtgaacagcacttttattatttccagttcagaagagccaaaaaaaaaaaaaaaaaaaaaaaaa

SEQ ID NO: 22886 - DNA, 2386 bp, Homo Sapiens
gcaaaggtagatggagagactgcatcggacagtgagagccgcgcagaatccgcacccctgccagtctctgcagatgataccccggaggtcctcaatagggccctttccaacttgtcttcaagatggaagaactggtgggtgagaggcatcctgactttggccatgattgcatttttcttcatcatcatttacctgggaccaatggttttgatgataatcgtgatgtgcgttcagattaagtgtttccatgagataatcactattggctacaacgtctaccactcatatgatctgccctggttcaggacgctcagctggtactttctcctgtgtgtaaactatttcttctatggtgagacagtgacggattacttcttcaccctggtccagagagaagagcctttgcggattctcagtaaataccaccggttcatttcctttactctctatctaataggattctgcatgtttgtactgagtctggtcaagaagcattatcgactgcagttctacatgtttggctggacccatgtgacattgctgattgttgtaacacagtcacatcttgttatccacaacctatttgaaggaatgatctggttcattgtccccatatcttgtgtgatctgtaatgacatcatggcctatatgtttggctttttctttggtcggaccccactcatcaagctgtccccgaagaagacctgggaaggcttcattgggggcttctttgctactgtggtgtttggccttctgctgtcctatgtgatgtccgggtacagatgctttgtctgccctgtggagtacaacaatgacaccaacagcttcactgtggactgtgagccctcggacctgtttcgcctgcaggagtacaacattcctggggtgatccagtcagtcattggctggaaaacggtccggatgtaccccttccagattcacagcatcgctctctccacctttgcctcgctcattggcccctttggaggattcttcgcaagtggattcaaacgagcctttaaaatcaaagactttgccaataccattcctggccatggaggcatcatggatcgctttgactgccagtatctgatggccacctttgtcaatgtatacatcgccagttttatcagaggccctaacccaagcaaactgattcagcagttcctgactttacggccagatcagcagctccacatcttcaacacgctgcggtctcatctgatcgacaaagggatgctgacatccaccacagaggacgagtaggggccacccagggccaggagaacaggaacagaactgagcaggggcaggtctccaaggcaagcccagctggtgtgacttagacaatgacgaggcttcaactcactgtcttttttttttttttttggagggtattttttatttgtgggttcaaaaaatctgtatatacagtctatgtgtttagaatttgtgttgtaagtaaactacagctttgagttggaaagaagtcacgggttgtaaaaccatttggatttttttaaaacaaaagtattaataatctggaagacagtgttgcccaggtcaggagtgttttcttggtggttccagcccccatcaattgaactgtttctgggctcagtcagacacagacattcatctgtgtctgaccaaatcaggggacttccccacctgtggtgggaggcacagcttagatgttttgtacacctggtcttttctagaaatccctgcttggagctgcagaagggttgccttctgtaggtcggaggaatggaggcttactaaccaggtaagccttctatgcatccacaccaaaatcctgcagaatgtaagtaagctctgctttataagatgggttcaccttcatcgcagactgaaagtttcagtttttatttttttcagaaagcacgaaaaattatttataatagtctggagaaaaaacacactgtaatatttcaagtgtatgcagtagaatgtactgtaactgagccctttcccacatgtctaggctccaatgtctcctgtaggtccacctaactgtgtgttttcagggacaatgccatccatgtttgtgctgtagacttgctgctgctgaatcctttctggggactttctcatcgggcagggagcagagggcttctcgttcatgcaccctttgcctgaacacccatgtagctgctgtgttgtgtatatattactcttaagaggagtgtgtgtgtctgtgtttgttttaaaagtcacttatttcttacagtgatttcaattgcaccatgacttcttcactaaaaccacaaagtcctgcttaaaactatggaaaacctaacctgattagagccttgactattttgaagattaaatgcacactttttatataaaaaaaaaaaaa

SEQ ID NO: 22887 - DNA, 1869 bp, Homo Sapiens
atgtcagagcgagaagagcggcggtttgtggagatccctcgggagtctgtccggctcatggcggagagcacgggcctggagctgagcgatgaggtggcggcgctgctcgcagaggacgtgtgctatcgtctgagagaggccacgcagaatagctctcagttcatgaagcacaccaaacgccggaagctgacggttgaggacttcaacagggccctcagatggagcagcgtggaggctgtgtgtggttacggatcacaggaggcactgcccatgcgccccgccagggagggtgaactctactttcctgaggatcgagaggtgaacctggtggagctggccctggctaccaacatccccaaaggctgtgctgagacagctgtcagagttcatgtctcctacctggatggcaaagggaacctggcacctcaaggatcggtgcccagtgctgtgtcttcactgacagatgaccttctcaagtactatcaccaggtgactcgtgctgtgctaggggatgatccgcaactgatgaaggttgcactccaggacttgcagacgaactccaagattggggcactcctgccttactttgtttatgtggtcagtggggtgaaatctgtaagccatgacctggagcaactgcaccggctgctgcaggtggcacggagcctatttcgtaatccgcacctgtgcttggggccctatgtccgctgtctggtgggcagtgtcctctactgtgtcctggagccactggctgcctccatcaaccccctgaatgaccactggactctgcgggatggggctgccctcctgctcagccacatcttctggactcatggggaccttgtaagtggcctctatcagcatatcctgctatccctgcagaagatcctggcagatcctgtgcggccgctctgctgccactatggagccgtggtggggctgcatgctcttggctggaaggcagtagaacgagtcctgtacccacacctgtccacctactggacaaacttgcaggctgtgctggatgattattcagtatctaatgcccaggtcaaagcagatggacacaaagtctatggagccattctggtggcggtagagcgactgctgaagatgaaggcccaggcagcagagcccaacaggggtggcccaggtggcagggggtgccggcgcctggacgacctgccatgggacagccttctctttcaagagtcgtcctccgggggcggtgcagaacccagctttgggtccggcctcccgctgccgccagggggcgcggggccggaggacccttctctttcggtgaccctggccgacatctaccgggagctctacgccttcttcggtgacagcttggccacacgctttggcaccggccagcctgcacccacggctccgcggccgcccggggacaagaaggagccggcggcagccccggactcggtgcggaagatgccgcagctgacggcaagcgccatagtcagcccgcacggcgacgagagcccccggggcagcggcggaggcggccccgcgtcggcctctgggcccgccgcctctgagagcaggcccttgccgcgcgtgcatcgggcgcgcggggcaccccggcagcagggccccgggaccggcacccgcgacgttttccagaagagccgtttcgccccgcgcggcgccccgcactttcgtttcatcatagccgggcggcaggctgggaggcgctgccgcgggcgccttttccagactgccttccccgcgccgtacgggcctagcccggcctcgcgctacgtgcagaaactgcccatgatcggccgtaccagccgccccgcccgccggtgggcgctctcggactactcgctgtacttgccgctctga

SEQ ID NO: 22888 - DNA, 1770 bp, Homo Sapiens
atgaaacgagtgcgtaccgagcagattcagatggcagtgtcctgctacctcaaacgccggcagtacgtggactcagatggtcccctgaagcaaggactgcggctgtcacagactgctgaagagatggcggccaatctaacagtgcaatcagaatctggttgtgccaacatagtgtctgcagccccttgccaggcagaaccccagcaatatgaagtacagtttggacgactgcggaattttctcactgattctgattcccagcatagccacgaagtgatgcctctcctctatcctctctttgtctacctccatctcaacctggtccaaaacagtccgaagagcacagtggaaagtttttacagccgcttccatggaatgtttctgcagaatgctagccagaaggatgtcattgagcagctacagaccactcaaaccatccaggacatcctatctaacttcaagcttcgagcattcctagataacaagtacgtggtccgtctccaagaagacagctacaactaccttatccgctacctccaaagtgacaacaatactgccctgtgcaaagtcctcaccttacatattcatcttgacgtgcagcctgccaagagaacagactatcagctgtatgccagtggcagctcctcccgcagtgagaacaacggtttggagccccctgacatgcccagccctattctgcagaacgaggctgccctagaggtcttacaggagagcattaagcgcgtcaaggatgggcctccctccctcactaccatctgcttctatgccttctataacacagagcagctgttgaacactgcagaaatctcccccgatagcaagctgcttgctgctgggtttgacaactcctgtataaaactttggagtttacgatccaagaagttaaaatcagagccccaccaagtagacgtgtcccgcatccatttggcttgtgatattctggaggaggaggatgatgaggatgataatgcaggcacggagatgaagatactgcggggccactgcggaccagtgtacagcacgaggttcctcgcggacagctcagggttgctctcttgttctgaagacatgtccatcagatactgggatctggggagtttcaccaacactgtgttgtaccaaggacatgcctatcctgtgtgggatctggacatcagtccatatagcctgtacttcgccagcgggtcccacgaccgcaccgccaggctgtggtcatttgatcggacgtacccgctgaggatatatgcaggacacctggcagatgtggactgtgtcaaattccaccctaattcaaactacttggccacgggctcaaccgacaagaccgtccggctgtggagcgctcagcaggggaactcggtgaggcttttcacaggccaccgtggccccgtgctttctctcgccttttctcccaacggtaagtacttggcgtctgctggcgaggaccagcggttgaagctgtgggacttggcctctgggaccctttataaagagttgagaggccacacagacaatatcaccagcctcaccttcagtccagacagcggcttgattgcctctgcctccatggacaactcggtgcgcgtctgggacatcaggaacacttactgcagtgcacctgccgacggctcctccagcgagctcgtgggcgtgtacaccgggcagatgagcaacgtcctgagcgtgcagttcatggcctgtaaccttcttctggtgactggaattacacaagaaaatcaggaacattaa

SEQ ID NO: 22889 - DNA, 6994 bp, Homo Sapiens
gagagactgactgtatctggggattctggcaaggtgaagagctggtctgtttggcaggaccttcccatctgggatccatctgtgtttccctggaatgggacaggcagctctagtcagtgagaaatcgcagatgtgagagagctgacacatgtccagctaatgaaaggaggaggaaggctggtctccgattgagctttgaagattaggaggagaaaaagaggagctttggaatatctatttcaaataaatttggtgtatttaagaatctggattgtttataatttgggcatttgggaggtggggttttgccatgttgcccaggtgggtctcaaactcctgggctaaagcgatcttcccatgttggctgcccaaagtgctgggattacaggcaagagccaccataccagttcctgtctagatattatgatgaagattgaggatggtagtttttgtggagcacaatcctgactgtacctgtgatgttgcattcatcttttggaacataagcagatcaccaggtgaatggctaaagaatctggaataagcttgaaagaaatacaggtcctggcaaggcaatggaaagggtctcaccctgtcactcaggctggagcacagtggtgtgatcacagctcactgcagcctcgacctcctggactcagttggtcctgagaaaagggtgccagcgatgcctggatcgcctgtggaagtgaagatacagtccagatcctcacctcccaccatgccacccctcccaccaataaatcctggaggaccgaggccagtgtccttcactcctactgcattaagcaatggcatcaaccattctcctcctaccctgaatggtgccccatcaccgccacagagattcagcaatggtcctgcctcctccacatcatctgcactcacaaatcagcaattgccagccacttgtggtgctcgacaactcagcaagttgaaacgctttcttaccactctgcaacagtttggcaatgacatctcccctgagattggggagaaggtgcggactcttgttcttgcactggtgaactcaacagtgacaattgaggaattccactgtaagctccaagaagccacaaactttccccttcgtccttttgtgattccatttctcaaggccaacctgcccctgctgcagcgggaactgctgcactgcgctcgggcggccaagcagaccccatcccagtacctggctcagcacgaacaccttctgctcaacacaagcattgcatcgcctgctgactcgtcagagttgctcatggaggtgcacggaaatgggaagaggcccagtccagagaggagagaagagaatagttttgatagagacacaattgctcctgagcctcctgccaagagagtatgtaccatcagccctgctcctcggcacagtcctgctctcactgtgcccctcatgaatcccgggggccaattccatcctacccctccacctcttcagcattacaccttagaggatattgcaacttctcacctgtatcgggaacccaacaagatgctagagcatcgagaagttcgtgatagacaccacagtcttggtctaaatggaggctatcaagatgagttggtagatcatcgtttgacagaaagggaatgggctgatgaatggaaacatcttgaccatgcgctgaattgcattatggaaatggtagagaaaacaaggcgctctatggcagttctgcggcgctgtcaggaatcagatcgtgaagaactcaactactggaaaagacggtacaatgaaaacacagagctgaggaaaacggggaccgagttggtctccaggcagcacagccctgggagtgcagattctctcagcaatgattctcagagagagttcaacagcaggccaggtacaggatacgtacctgtggagttttggaaaaaaacagaagaagctgtgaataaggtgaaaattcaggccatgtcagaagtacagaaggccgtcgctgaggcagagcagaaagcctttgaagtgattgcaacagagagagcacgaatggagcaaaccatagcggatgtcaagcggcaggccgcagaggatgctttcctcgtcatcaatgagcaagaggagtccacggagaactgctggaactgtggccgcaaagccagcgagacatgcagtggctgcaatatcgcgcgatactgtggctctttctgccagcacaaggactgggagcggcaccaccgcctctgtggtcagaacctgcatggccagagcccccacggccagggccggccgctgcttcctgtaggcaggggctcctctgccaggtccgccgactgcagcgtgcccagcccagccctcgacaagacctcggcaaccacatcgcgttcctcaacacctgcttctgtgacagctatcgacaccaacggactctgagccccggactctgcttaccctgatggctgctcagcaccacagagtgcttgggctgagggactgactgttggaacccgtgcatgtagctgccgggtcatcagcaagaaatgaattggaggcaggaagagtccaagcctgaataataacaccccacagcctctctgtgcacttgctgtctgcggagccagtgtgccattctctgcacatgggcagccagcctgagctgcctcctccatggctttcctggtttgttcctctctccactgaagctgacttagccggccccttttcagtgtagaccaccagctcccctccccatctccttgagtcagcagactgtccaatgtgctcagccaggctggaggcggcaggcggcaggcagcaggctgtggaggaggcccctcggtcagggagcggcctgcctcacccctgaatagctccttcggccccatctccatcctcagcagatgacactgattggcctcacggggacttgggtaagcaacaggcggcattcaggactcttctcaaccctgctgttcagacttgataagatctcagagtccacaggaaagaagtcactgttgcaataaaagcacccgtagtagcaaaaacataaacaaataaaacttcccccacatcacagatgattttggacaagattttccaaccttgctggctactttagtttgggacctgttttttttctcatttgattttgcttgtgcagaaaatagtttccagcacatggattgatctgagagagaatgaggctcagttgtggatagtctgttttctctgagcatgttggccaactagtatcgtcaaattattgagtggatcatctcttggaaatgcagaacttctgccaccacttggctatttgcacagtcatcttgttctgtgtccttttatctctcagaccacacacatctggaacgctgtgggcatcttctgcccatgggctccatttggcacctgctgagccacagttgtcctgctggatgtgctgtgcaggttggtaggacttgcccccactgtcaaggcctggtctcatctgaaaagccctcctggacctcaaagaattcttcagacctcatagttacaggtcattatatctactatgttgatttatcatcaggcacacaacttctgtttccttctcttgtgttatctgatagcgtccctccttgagctcatcagaaaggttttatgaaatgtgaaccattttgggaaaagctgatcaatttttcttcctagcttcccattttcaaatgggacatcactcatatccctttcagaatgttaggaactgcctcccacattcttccctgtctttttgggttttgttttttgttgttgttgtggttttttaacacaaagcctgggcaacagagcaaaactctgtctcaaaaaaaaaaaaaaaaaggcaaaattaaagaatttcaagtccctaatttactctaaccaagcattttcagtcttacaaagaaatctagtgcacgacacctttaaaatgcctagatttccattgcctaaagtaaggtgtgaccagtgaaacaacagcagagaatcatgttcctttgctgtggaacacataagccccacagttttccagtcagcctaatacatgggtatcccccgaccccatctgcctccttaagccacagtccttggtggggaactctaagggggacggagtcagtaccccggacagggccacatttgcatgagacatggctgtctcacaggtcacagagccattacaacagcttactagtttttcatggatttgttggattaacaccttaagcaggttttttattgttattttgtttgtttgtttgttttgagacgggagtttctctcttgtctcccaggctggagtgcaatcgcgcaatctcggctcacggtaacctctgcctcccaggttcgggcgagtctcctgcctcagccttctgagtagctgggattgcaggcatgcgccaccacgcccaactgattttgtatttttagtggagacggggtttctccttgttggtcaggctggtctcaaaccccggacctcaggtgatccccccaccttggcctcccaaagtgccaggattacaggcatgagccactgtgtccggtcttgagcaggtttttaaaatctccagtggccataaaactagccagggtagctcatgcttttactggttggaataaggagccaaaaccaacaaaataatatttattagggttggatgcccatttctgtggttaaggcttaggtttggtgtgcagagcctggcctgctcttgtgggctgtggttgctgtgacagtttcgttttctgaatctttgtaatgctcttccaccctgctcgtgctgcccagaggctgatctgcaaacctgggcagtattccacactgaagctcagtttgcaaaccttctgctgtgttaattctggtcagtttcacacagaagtcacgagggcctctgcccaggaccttctattcacatttcaagaatccctttctgaaattctccaactctctggtcaggaggaggagcaccattggggcggggtaggcagctagaggcgcaggagcgaatccaggttccttgcgtggttcccagcctctgctgacagcacctcagctaccaggtggggagtggaaattcagcctgcttagaggactgacctctacagttcatatttgcagtgacataaaaggcaaagaggagctggcatggtggtacagaaggtatcagtcaagcgcaggctcttcagaaacctagaaactaaaaagagatgcaacatgtgactggccatcagccagacatgtctagggtgagaccagtgctcagcaccacccgccaaggaacactgatgagttgtgggacattatggtcggccaagtgaggaatgattgcagggaccagagaagaccaaagatgccagatgtccccagagtttcttgagggctgggtttcacgtctttgcttgtcctttttgtccccacttgcctgcaccgtgcctgactcatccagtggggaaggtgactcaagaagttgtttaagcctaggcctaggcagtccacttcgggaggtgggggcactccacactggggggccctgcagctccagggctggtgctctagcagatccgctcaggcacggttgggtgaccgtggggtcaccgattgcgtagattatttctagggcagtgctgggttagaaatgtctgtctggaaacaggacacatcttgccaccacaagtccacacctggccttggctgctgcccgctctctgcagcgtggatttcctttgcccatttgggccagaaggtcaccaggagttcatcactgcttagtgtcaacttgacatcttcagcttccagacagaaaacccatgctttactttgtacagccctgtcccagagttagtaagcctcggcttgtcacctgcttgcaaagggtatagacatcattctgggtagttctagaggatatcgcaacaagtgcgtttgaaggttcagcacagctggaattgtacggtagtgagctcttcaaaatgaaaacagaatgaccggatggccatctgtcctggaaactgtagaattgaataaatcactgaaaatagaacacttcttggaggctttcttcagaactgaactagaaacaaggtttccaggctcccaggtcagtagaccaaaccaacttccttagatttttttttttaagctgtttgcagaaaactgggtggtagcgtgtctgaaccaaacggaagaatagccagcggagcatggactgttccagcacgggccagatggccagctgtcgagagcagccctgcccagattgcggtgggggctgtgccagcggctccgcagggcccttccaactctggagtgtctgtagttcttgtgaaaccaaaacgttgactacctgcctctttcctcgggcatcgacgtgctcatttccaaagatgatggtgcaggtgaccttttccatcgtgagctaagagaaggttaggaggcctgaggggcgggccttgtgtcccctcctccccctccacagcccctgaggtggagcttccctcacagaccccatctggtcgagcctacggctgcccagtgtacactcagtgatgcttataccaaatagggcatgtgcgctggtgtctgttggggacagccccatccctaccttggagtcggcagagaagcagcaataagcattaggcgaatgattgaaagggctgctgcgccaagaggccttcagtccccttaacgtggctttccaacttcctgacgaggctacaaaggctccgctcacaaaagaaagccaataatgtaaataaatagaaaacgaagcctccacgcgtggtttttaaagggggatgatgaatgtgacaccacccacagaatgcattagaatctggtttttctgtgctttgtcattttactctgataggaatttttgttacctaactctgtgcataacttatttaatgtactgtataaatgaaccaaaactgttaaatatgtatttagtttgttctacttaaagtagtcaataaaaaggctatattcct

SEQ ID NO: 22890 - DNA, 1599 bp, Homo Sapiens
gagttaaggacagattttaagagccccatagaccagtgcaatcctgttcatgcgagggaacggttgaggaacatcgagcgcatctgcttccttctgcgaaagctggtgctgccagaatactccatccatagcctcttctgcattatgttcctgtgtgcgcaagagtggctcacgctggggctgaatgtccctctacttttctatcacttctggaggtatttccactgtccagcagatagctcagaactagcctacgacccaccggtggtcatgaatgccgacactttgagttactgtcagaaggaggcctggtgtaagctggccttctatctcctctccttcttctactacctttactgcatgatctacactttagtgagctcttaacgcaaagaccatgcacatcatcagagactgagatgggagaggcctgagacggagaggtgcatttctgctggtgactggaggagggaccagaatgaggatacgtgagaaatagacccggcaggcagtcagactgaatgggagctggaatcacgcagcagctgggagccgagttaaccctgcgtgtctgtgtcaccctgtttgtcaatctttggcattcgaattccacacacggggtcctagagcccttctgagcatcagtggtgtgggggagtaggtgacgaaacactagacctctcctgagagagaattgctgcttcctgaatccacttcattgaacagcaccttgcaagttcaaatgagttcctgggagcggaggctggaaggccacaaggtgcttgctaaggaacagaatgacccagagtcaaggccaagtctgcagggacctgttgaaagcctcgagaatgtcttggctgcccaagactcttgttgcctttcttccaagccatggccatgccctttttctcaaatgggaggggctggagggtgtgtgggatttgtcttcagctgcaaccagccttgagcctgctgggctattttcagctgaggaggggtgaatataggaaaaatgcatttttgaaacgtttgcaacatgatcaaggtgttagttctccaccacacaagttgtattcttcttttgccacctcaaaccatcacagagtctttaaatgcaaatcaattggtcaatgctagtcaaagctatgttcttacaaaaaccccagacagctcagagctcagaaaatcctgtggagtggctgctctgtaccgtgggcatccggcagccaggaagtgagacaacataattataactttgttttatgatgctgcatcatttgtactgtttaggtcgacgtgaggacatcatcttatttagaattttccgtttggcattctcttttgggtgggagttatgctgggggttgtaaataatgacaaggctgagatttttatgatgtttaaattgggcacaatgattttgaccttattccccaaacttcttttcttttctactgtttaacatacacaggctatttatacacgtccccagctcccatctgaaacctgtgactcaggtttatgaatggtgtttgtgtagcaacacattgtgtgctatgtttattaaaatgcagcgacaaaaaaaaaaaaaaaaaaaaa

SEQ ID NO: 22891 - DNA, 1633 bp, Homo Sapiens
tttgactgcaagttacaaagttttaagaacatgatggttggtctctaatatatttggaactgattcataagaaaagttattaaaattatctttgaaacacctcttgaagctaatttattagaaaaaatatttcagttggaaggctgtagaagtaatgtttaaatgctaagtcataagttcaggatatttcttttctatttggttgtgcaaaatgtttttcccagttatttaatcgaagtaattccttttaatagaaagagtcagttaaaattcagcattcatggatagatttttggaacgaaaaagggtaagtataagaaaatattgcaaacacattaaaacagttgtatggtgcaggaaaagaagattggaaaaagaccaaaacacacttctccagcaacactccatcagctttttaaaatttagagctatctgctaattttttccctcttccttctcaataaatgaaacaaacactgggcagctgcaggtttctcccaatcatgtctctttatgtaaagacagtaacatgcaaacacttttagtttacatccctcattcacagtgtaaagcaggaaatggtgtgggagatgtgagaccattctgaggtcagcgatagcccaaaggctctgcagtattccctccaatggccaaggattccgtgtgtcatctgcaggagtgagtaggcctgctgtatttcttgtaactgctgggtgttacaaaataagttacaatgttttacactttaaaaaaaaaacagaaggaacatttgctttattggttacttactagtttagcctctaggttatggcacagcatgctaaaaaatcatgtgtttaaaagtaaatgttggtaaaatgctggcatctggtcctattgtgttgatgcattttcacttctgtggtcataggaaatggactggtctaaagagagtgaggcacaacacaagcagggcattagtttgaataggaagtcaatcatatttggttttatggcctggtgtattttgggtttaagataaaatagggaaaaatgtcagaaatgatccctatgcatttattttcatggatacccttaatttcatgggcatgcctaataatgatctatgttctaactggagcttagggcttattttagatattggagtgtagctttattacagatggattttatctttcaacattgcattttgatcaactttgtatattcacgtgtattaaaatattgtgcactaaatgttttgcccttgtttgctattatatggtcaaggcatttatcagcactattgtaatgaactcatgtaagtggcatgggtcagggaaaattatttcctacttttctgcctaattaaatttctgttttccagtattacattaatttatttttggcttccatttctgtataaccaaaatagttactgtatttgtgtggcattcctattattttgttgctaaaaatattgtagtttttatttaaaataatctgtaccttaattttttaaaatgtaaccaattcaagcactttaagcaataatgtcaatcttgtgaaattttaatcagtttaacaccctgcctctaaaattgtttgcaaaaaataaataaatgaataaaatgggaaaaaaaaaaaaaaaaaa

SEQ ID NO: 22892 - DNA, 1772 bp, Homo Sapiens
ctcagacctcagggttgtgacgttgttgatgttgtcaggccccagtacgtctctagtgaccgaagcagacctgcctgaaagggcactccggacagtgagccctggctctaacctgtgccctcatatttctgctgcctcatatggtcttgtttgcccactctgtaggtgactgatgatcaccctaaaagggaggtaggtatctagcagtagcacagttactttgagcctgaccacttgttctgaagtgcagatgttgaaacatgcattgaggaagaacactttaaggaagcactttatgatttactcatggctggtgttggcctcaaagtaaaagaacatcttaatgcagaacagtacaataaagagccccataggatggatgccatcatctgtccccatggttgggattgccaaggaaagtgccttgttctgtgcatcttcagaatcccccaggccctctcttgatccttttcatgaagtccagagcattccttctattacaggctgaagatgcattgtaaaaggtaatgctataatagtattccctcttctcaataaatgtgcaaaactggagaatctggtgctgatctgcagcatacttgacaacacagggaataccgtggatgttccacgccagccttacatccgtccccattgcctgcccatgtccagtggccctgcgcaacaaaagtaagggcttgtcttaccacattctccccagcatctagctcaaggtagatgactgactgggaaattccggttggataaaatggcttttccacattgcaactttgcatctctattaggaaaatttagattgaacctttcctctacttgatgcttagtttgagaacagttttcacaactttagagggtctctctcagagtatgttatactgtaaccttgaagtttgagatgaaacaaggtgtcagaggttttgaatctttcaaaggaattgccttttacagattttttttttattccctaagaagggaaaaagagagggaagaactacactaatgttagagataaggtatgttttggctcaaaatgtgtcatgaacctaaaggtaacttgatgggcagaaatgtctcagccatgtgaaccaagaagtgggaccacagtgcaaggctgtgggtggcagcactagatatggtggtggcaggagtgtgacatgtaggcactccatgggggacagctggacggtgtctatcaaaagtgcaaatgcgtaagctctttgaactagcaatgctactcctaagaattgtacctgtgtacaaggtacttgtgtacaagagtttttgttgaaacattgtaatagcaaaaagttggagagtgccaccaatacaggggaatggttaaatacattatggccagcttaaacaatggaatagtttgtagaaatttaaaacaatggatcctgtgtgtgtgtactaccatagaatgggccccaagatgcatgattaagtgaggaaaaaagcccatggtatcctaatgtttggaatggagaaagtgtgtagatgtatgtgtgtgcatatgttttcacacagacgtatacacgtgtatatcatatgtccacctgcatatgcctaggatgtctctgggaggatatctagcagcccggcagcctgaattgcctctgggaagaggggtgggaatgacttttcaatgtacaccttttgtaccttttgaattttgtaccatgtacatgtattatctattaaaaaatagttcttaatttttaaaaaaaaaaaaaaaaaaaaaaaaaaaa

SEQ ID NO: 22893 - DNA, 1945 bp, Homo Sapiens
gcagattcttggattcacttggtcactgggctgctgatggtcagctctgagacagtggtttgagagcaggcagaacggtcttgggacttgtttgactttcccctccctggtggccactctttgctctgaagcccagattggcaagaggagctggtccattccccattcatggcacagagcagtggcagggcccagctagcaggctcttctggcctccttggcctcattctctgcttagccctctggggatcctgccacctgccctcttaccccgccgtggcttatggggaggaatgcatcatctcactttttttttttaagcagatgatgggataacatggactgctcagtggccaggttatcagtggggggacttaattctaatctcattcaaatggagacgccctctgcaaaggcctggcagggggaggcacgtttcatctgtcagctcactccagcttcacaaatgtgctgagagcattactgtgtagccttttctttgaagacacactcggctcttctccacagcaagcgtccagggcagatggcagaggatctgcctcggcgtctgcaggcgggaccacgtcagggagggttccttcatgtgttctccctgtgggtccttggacctttagcctttttcttcctttgcaaaggccttgggggcactggctgggagtcagcaagcgagcactttatatccctttgagggaaaccctgatgacgccactgggcctcttggcgtctgccctgccctcgcggcttcccgccgtgccgcagcgtgcccacgtgcccacgccccaccagcaggcggctgtcccggaggccgtggcccgctgggactggccgcccctccccagcgtcccagggctctggttctggagggccactttgtcaaggtgtttcagtttttctttacttcttttgaaaatctgtttgcaaggggaaggaccatttcgtaatggtctgacacaaaagcaagtttgatttttgcagcactagcaatggactttgttgtttttctttttgatcagaacattccttctttactggtcacagccacgtgctcattccattcttctttttgtagactttgggcccacgtgttttatgggcattgatacatatataaatatatagatataaatatatatgaatatatttttttaagtttcctacacctggaggttgcatggactgtacgaccggcatgactttatattgtatacagattttgcacgccaaactcggcagctttggggaagaagaaaaatgcctttctgttcccctctcatgacatttgcagatacaaaagatggaaatttttctgtaaaacaaaaccttgaaggagaggagggcggggaagtttgcgtcttattgaacttattcttaagaaattgtactttttattgtaagaaaaataaaaaggactacttaaacatttgtcatattaagaaaaaaagtttatctagcacttgtgacataccaataatagagtttattgtatttatgtggaaacagtgttttagggaaactactcagaattcacagtgaactgcctgtctctctcgagttgatttggaggaattttgttttgttttgttttgtttgtttccttttatctccttccacgggccaggcgagcgccgcccgccctcactggtcttgtgacggtttattctgattgagaactgggcggactcgaaagagtccccttttccgcacagctgtgttgactttttaattacttttaggtgatgtatggctaagatttcactttaagcagtcgtgaactgtgcgagcactgtggtttacaattatactttgcatcgaaaggaaaccatttcttcattgtaacgaagctgagcgtgttcttagctcggcctcactttgtctctggcattgattaaaagtctgctattgaaagaaaaaaaaaaaaaaaaaa

SEQ ID NO: 22894 - DNA, 929 bp, Homo Sapiens
cagaagctgttccaagcactttatttgctttatctcagctcctctcagcaaccctatggggtaggggatatggtatccctgttgtgtagacatggaagctgaggctcagagagtttacatgcaagggcactttagctaccaggctgactccaaaatccatattcataagtgctagactgtttagctactataaatccctgtaaagtagtgtcactagcctgtaggaccaggatcaaaacaaaacaaatggccacttcagaaatcttgccttcatttgttgccacgatggatgcaagtaatttttctttttggcaggtgctgtgctcttggctcagtaacagcccaaattatgaggagatcaccaagtggtacctgggttggaagtcgatgttctcagaccaagtgctggcacatccatctgtcaaggacaaatttaatgaggcacttgatatcatgaaccgggcggtgtcctccaacgttggtgcctacatgcagccaggagcacgggagaacattgcctatctcacccacacggagcggaggaaggacttccagtacgaggccatgcaggagaggcgggaggctgagaacatggctcagaggggcattggcgtggccgctagctctgtgcccatgaactttaaggacctcattgagaccaaggctgaggagcacaacattgtcttcatgcccgtcattgggaagcgacacgaagggaagcagctctacacctttggccgcattgtgatctacatcgaccggggagtggtctttgtccagggcgagaagacgtgggtgcccacctcactgcagagcctgatcgacatggccaagtgaactgtggcaggtccagaaccagtcagagacttgcccctaagagggatgtactgtaaataaacagtatttttagatcaccttcaaaaaaaaaa

SEQ ID NO: 22895 - DNA, 1892 bp, Homo Sapiens
cgggaacccgtgagccaccgagagagcagagaactcggcgccgccaaacagcccagctcgcgcttcagcgtcccggcgccgtcgcgccactcctccgatggccacagatgtctttaattccaaaaacctggccgttcaggcacaaaagaagatcttgggtaaaatggtgtccaaatccatcgccaccaccttaatagacgacacaagtagtgaggtgctggatgagctctacagagtgaccagggagtacacccaaaacaagaaggaggcagagaagatcatcaagaacctcatcaagacagtcatcaagctggccattctttataggaataatcagtttaatcaagatgagctagcattgatggagaaatttaagaagaaagttcatcagcttgctatgaccgtggtcagtttccatcaggtggattatacctttgaccggaatgtgttatccaggctgttaaatgaatgcagagagatgctgcaccaaatcattcagcgccacctcactgccaagtcacatggacgggttaataatgtctttgatcatttttcagattgtgaatttttggctgccttgtataatccttttgggaattttaaaccccacttacaaaaactatgtgatggtatcaacaaaatgttggatgaagagaacatatgagcacatgagttaagattgtgactgatcatgatttatttgaagatggagcactgctgatttatgaaggaaaaaagaagaattttctaaagattacacatatttcagaaagactttacccaattcagttgtcagacataatgatttatttgaaggcttgttttatttgaagaaaagcatattgccaaaaattctggttaaaagcttcctaatgggtaacagaccatgggagagatatgtggttgggtaatgcgaatgtagttatacaaagaaaaatacagatgtctccagacctgaggactttttaatagggcagttgttgtgttggtggcacattggatatttctaacatgtacaaagctatgtattttgatttactttcatttcttgctatgtatatgtacttttcttaaaatgccaagaactttctcttgctatcattgctccttttgaaacaattcaattttcatgtctacagctgactgttttgttaagattgagtcatcgacattcaggatttaagtctgaggtagtcaaccctcaggaaaaaaaaaatggcttatctgaaatcagtactgtggaaatgaactatattagctattatgaataatgtccagtataagaatatgcttctggaattgagttctccttttaagtaccaatgatacttaaatttctcagaaatgtaatggtgtgtcattgccttgaaatgcttgcttagggcttcttttatgttatcttaaaaagtgctggtgaattttccattttttacatccatttcacatgtaagagacaaaaaagtctagattggtcttgatattgagataataaaaagtaagtagcattaagaaaggtaacaatcttcattctacagatgaactcattgaaacaatttaggggaatgaggggcaaaaggggagaaatactgctaaagaacatgagcataaaaatgcgtgcgtttcagtgtttaagaaggcttgataaagaatgtcacttttttatttaactgataagatttttgttattttttactttgataagtaaaccaaagaatatttgtatttcaagcagtttgtgtggtgtttctatataattttctgtgtataaataataaagtaggcatttgtttattttgtaaaaaagaaatgaaaatctgctggccagctatgtcctctaggaaatgacagacccaaccaccagcaataaacatttccattgccaaaaaaaaaaa

SEQ ID NO: 22896 - DNA, 8624 bp, Homo Sapiens
tgtcaccagaagcttccaagctcagttcaagagccaatgagggctgagtgtggtgctggaacccggtgttttgggggactcaaggccctcatagccaaagctggggacctgctggccaggcccactgctctgcagccagacactgagcaaatccaagtttcattacgtgtggtggagagtttgccaaactgccacactccacagccatttcctgcagagatctcaggggccagtggcctggctgcagcctcttggcttttccacatctcccacctcagggaacagtccactctgtgtcgaggctttgggcctgagtggcaggctggaaccaagaccctcatttggtagaaagaaaagccaggtgggctgtaggaggcggtggctaggaactcagggctggatcagtgtggtgggtggctaggaggagtggaaagacactgatgccacctggaatcatagatttcttttcccacaaggatttgcagccctcttccacctcaaagctacctccaagtccagccgctgttcacattggctttggaaagcagcctcattctgggcacctagtaatcctaccccttcctcctgcccctgtccccaagctgaactgggcttggagagcacacagcttttttactcaggggtcctgggggtgggtaggctcccagtagagggagggtgtggtggggttagtctccagggggtctggcaggggcccaatccccagtggagaccacacccagcccgcagctctgcaggctccaagagtgaaccaccaggggtcccaaacctgtcattctagctgatgcacagctctcagaatccaatgattattaggaatcttaaccactgagatcttaatcaagagagtcccagaccacctcctgtggggctatctccatgcatccctctcttgcacacctcttttcaaaagtcaccatgtggcttgactttgtcaagggcaaaatctgcatattatctcatgtgtatgaagccccccacccaattccagccgctggagtcttagaggagtggatttgctgagtagtactgtaaacggtctctgttaatttttttttccttcattctcctgttctgaaaccagattttgacttgacgatcagtgaggttgagcatgcgggacagttgcaggcgcttctctttgttaatgtagacgctgaagaagaactcccgttccagctctcggatctggtacttggtataggggcagcgctttttgcgggtgcgttggccacctgtggagggagaaaaggcatggggtgagccaggtgtgggggctgcaatccaccccagagcccatagctgaggagaagggctgccatggggactggtggtccagcccaagccccgtcaaagtctgcccaggcccctgcctttaacgctccgactgcatgcttggaacggccgcagttggaggctcagccacagataaaagccagctccctaaataggcccccggggaagctgctcccgctgcccccagaacagaaaggagagcttcgcacagcaacaggcgagtttgcgctgcctaagcctctttgaaagcagccaagtgggggttgccggctgcctctcgcaggccagactaaacaaacagccgcctgcggacatttcaccttccagcacctgggctgccccttcccaaggcagtaaaggcggctccagtcccagtctttcccggctgcggccaagactgggcagtccttaacatctggggcggctgccgggtctttgtcagcctgagtcctggccaccagcttctgcctccccggccagccttccggctccgccgaggtggggaggtggcggcggaagccccctaccctaggccttcgctgagcaccacggccacacggccatcctgcacacggcagagcagcggctctatcttaggtagggtgaagggaaagggggcttcccgaagctgcgggcaggctctacttgctccccctttaaaaaaaaaaaaaaaaaaaaaaaaaagacccacaagacaaaaaaaaaatcgcttttgacagattgaataacaattgtgaataacatgcagttgggcagaaggaggcacgtaattgccaccacgccagaggaaaatggcttcctttggacaaaaaggccaactttgggttaatttgttcttttaatatattgctagagctaagcgggctactttatctgttaaacgcgctcctagcgccgtcgttaaacagcgacgcctttgaatcccggccgggactggagtcccggcgcaacacatggcttttataaaaatctccggattacctcgctatcaaaagctcccgaagcccttgcagggggaatttacaggcgcccacctccggctccccagcctggagctggccccgagcggggtcgagctgctgggcttgggagctgagaagggaaaaaagggaaaaggggagttgtttttttttgcaggcatgccttggccggtgggtatttcacggccaatttcagcactcgccacgtgatcccgccttttataacaaagttttgttgggggaaacctaaaggcccttcataaaccttatatgcttataaaacagcatataaaaatttaacagcggtgctgcgctagatttccaactcccctttcataaagcgcagggcgctgcctttatacgtactggagccgccggccttgtcctcagtgtggccggaagacgactcggggctgctgctgctctcggggcgccgccgccgctctttctcctctgctgccgccgccgtctcccggcagccgccgccgccgccgctgtccgaacttgaagttgccggcgcgcccgttgcagccgccgccgccgccgcggaggtcgccgtggccgccgggggccccttctcggcgctcttgtccccggggtagtcggaggaggcgaggttttccggggtgccgtaggctgtctcgaaaaactggtcgaaagcctgtggcaggacgccgttcctgcccacggtgctatagaaattggacgagactgcgggggtggggtggtggtagacgttggccgagctcttggccagcacgtcgccaggcacgccggccgcgctgggcgcctgcaggcagtctctgtgcacgagctcctccgcggagtagcagtgggccagattgccgcgggggtgccatttagtggcgggctcaatggcgtactctctgaaggtcacttcgcgcacgggttggacctggggcaggttggaggagtaggagtatgtcattgggcgcgaagacggggtctggggcagaaaagaagggaggctggagaaatctggacccgagacgtagtaagtacaacttggcaaatacatgttagaggagcagggaccacgctcatcaaaatccattattgggctaccttgggctctccgcagtagccgagcttaacatgattctccactgcagctgcctctttgaagcggatccgtgaagtagaaatttggagacgtaagctgacgtggaaatctatccccatccttagcagggaggtgctggtcatgtgacccgatgttgaaattgacaagctgctagctagtccgggccttttccccccccctttccttttttttttttcctcctctcccctccctcccggcttcctttctttgtagccacctcaggggaagcaacagatcgtcactcggtgttctcaccgaaagcacgtaatcgccggtgtaactcatgttggctggggggcctcccggcgcgcgcggagaggctggggtgcgcccccatgcagcatgcttgtgctcaattgcagggtcctcgttctcgagtgtgcagagggcggtgagagctcaactctcgtccccacctcccacccgcagctccccgggtgggtgagggatgccctggactggggatagccaggtgggagtccgtcgctgtgtggcctgtggtctcggagtctgttctcctggagtctcgcatttgcacccccttcttcgcagtccccctcccatagacttgctctgggaagcgcctctgcctccgaccctagccggaaccccttcggggccagagtttgaagccgtggatgtgcctgcctggtggcttgtccgatttgcacggtgacttgattacactctctcattcatggtcacttccgaagcgctttagtgccttccgtccctaaaccgccaacagccagaacggcttctccccgcggtttgtcactgatccgcagggcccggaagggccttcgtcttacccgggatccacctctcccctcatcttccctgcctacctcttcatcccaccttctgtccttggagaaactccctcctcctcgctgcctgccgggcttcggagtgactcggcagagacagaggcacaggggctgccctgctgctcaccggtccacccatctgcctggtcttctggagctgaggactcgggaaaccatgcaattgaggcaagccttgggctgctttagaggcgctgacatccgaggagacttctcctgggtatgctgcatcttcgtggggggcccatcaggctgcttacagagctccaggggtgtggggagaatggaggtggaaaggacgggctgagggccaaggagaggtggctgagaaaggggtaacccactactctcctactctccttccttgcaatgtgtgagagtgaaagcaagggatgtgcagggcaaaaactcagagagctctgtgcctttcctactgctcattccacaggaggaatacaataccacagaaaggagaggtgcttcccgaactccctgcacctggggaaacagggatgtctttaaaaagctaggtttgtgctaaggatagagagaggccatagcaatactctgagtctagctttcttgagaagaggaaaaaaaataaattaagaaggcaaaatatgctccccatcctgcaggattgaaggagcaatgtttggaggaagcgaaagaaaggagaggacacagagcacagagcagccaggcagagccaggagctgagaagggcccagacctgaggcctcccaacaactctcttcttggaaggatctgggatgttgctgaaggaaaataaaaaaatatgtaaaaagataaccttttgtttttccctctccaggaaatagccaaagttatttacatatcttggggagatttagagtataaactctaagatctttggtatttaagtgtcaacatcgatttatttatttattgctgagctgactgtaactgactcaataacaaatctaatcgtgtattgcactggaaaagaaatattcttattatgtattttctccaaataatggcctaccattgcatttgaatacctgctgtaaatatcaataatatgaagtaattactctgtagtcgagtaaactaatttattagcattaatgtttatgtggctctccacctccccccaccaccacctttacaaggattgcttatcacaaatcaagctacttggacacattggtttaatgaactctttattcaagatttgctacaagaattttcatgtcctttgaatccctgagaactgaacttgaaattatttgtgcatcttcagcttgacatatttgtccactgtggcttgtccagagggcagcagtgctgtgagtgagaaggtccagtgggaaggaaggttattggagaagagtagcctcagacctcctaaagctgggaagcacatttacagaattgccctgcagcgaaaaaacttctatttccagcagtgaccaacaaggcaaaatgtttgtttctccacagcatctcttttttagagacagaatataaaagacagaaggagaggtttcaaacagcggtattcgagctgttccctggcttgattttggctatcccaagctctctctctgcagcccacccagtccacgccacccctaccttcgaacaaaaggaatgcatgaagggtttcagtgactttgccataacaaaggcgccaccattgcggggctcgccccgcccctgggtgaaggcaaacaaattcttgcacttgtattagggcttttaagaccataattgaacccgggggcgtctaggaaaaccgaaaacagttctagacagacctgcggttttatagcagttttggcagtcaacttcagcttgtgcctgagcagacggggttgtggtggcccgccagcgggggatgccaggccacctcccccagcggcacgcagcccctctcttaattagatcggttttcccctggtgtccgggagagcggtcccggcagaaaggtcggtatgggggtgtgcgctgttccgcataaccactgcctcccatgtcctcctcgagggccgaaccgagagggtgctggcagggctggatcccacgggtgtccgcaggagacaaaggcgaattccggagaaaaggctggggctgagaaaggcgctccgggagcggctggcagggcaattcggcaggctgcaccgaagccgagtgcccggagggacttgccgcccggaagggggtgtgtgggggcgctgccgtgaagatggatgagggaaaaggtttttgatatcagcagaagggaaaacgcctggagtggccgaacacttttagttgcccagcaggaataggagacgggtactcagctccccaaggctgcgcaatatcccagctttgcccgctcctgccctcgtgttcggaatatgctggcggtgtgaatgtgaaggtttctccaggcaggcggctggggcgaggggtgggcgcagctctgaggatcagaccaaatctaggggaaaaaggggaggcagaccttcgggtccttggttttgactttgctctgagcctatgattgactcttccgctttgcaggaggtccaacagccgagcttagcccaccgggctctgggaaagacccgactgaggctaaagccgccccggaaggccaagtccgagttccatttcttgaagaggccggcgcgcgtaaggctgtgacattggccctggcgactggcttcccaggagctgttctttctcaggagctccacagcgcgggccatctccagaaaactgtcttcagagtgtatttccttttatcgtcaacccagagccccaccgcggctaatgcaagaggccaaaaaatgtttggaggaagaaaaacaaaggcaggaagtggcggcggcctgacggtgcgtgtgtgtctgcagagaagggagggagccggctcagtctcttcttgtttttccaaacttcaaggtccaggcagccctctgcagggccgggccccattgctccccgcgcggcattggaggtggccgcccggagaggagaaggccaacgcctgcgccaggcttgtcaggcggaaacggctaacaaggagatttggtcagcaaaacagacccagcctttccgaggcttcgtctgacttggcccgaaaggttggggagggggggcttgcgcagagcctcagggaccctcctctctggggactaccatccctgagccttacgcttctttccacagcctttgcaggcggaatatcggaataaagtgggtccaggcgcctctgccgcctccgcttcttcttgcagcctgaatggtccgggaggcagcgggagggcgccggcgggcagtgcccaggcggggtcgcctcgaggccgtcggtgagcaccgggcaatgcgaggccttgttaccgaggttgttgtgctgggggcgtttccagcacagtcattcaagggacgtgagctgcaaggatcgtcacttgacaggcggcttaacaccctctcactccaagggaggatacagctgggtggccgggagcacctccacactccaggcttcccagctccaactggcaaagctgctgggccaccctcttctctccctggggctggcttgggaggcagcagctgctccttgtcccagaaatctgagaattcgaagtccccagtacttgcacatgcagccctttaaatgcccagcatttgtccacagtctcaatgtcaatgccaagctgccccagtcaccactgtccttctcaagggggtcctgtccctctacagttcctgatcctgctcctgtcccccctacagttcctgtctcctgccctgcctccttccagccattctcacctgctgggacctcctgtctcttccctacctcttttgatgcctctgctagactgagcaacagctgaggtgccactggagggcatccaatactcaggcgcagagaagaggggctgttaggtccctgactctcccccaacttcgggcttccaccagagcctgaactgagtctcccacctccttcttaggaatactccacctcaaggccccaccaagtctggcttatctcccttcctctcccctcccttctctaccctcctttcttccccaacacttcctccttctcttctgcggacccagctgctgcttttctaggctgggcaacccagatgggataggcctgggaggggtcaggacccacttgacagactgaatctcactcccagatggctacagttaagtttctctcttggtggattgcttagggcaccatcattattttgcctcctcctgcttgcctaatcccttactttcctctgtccacaaatgtcacactgtttctagaaagctacacagaagagtatttcaaccctggtgaca

SEQ ID NO: 22897 - DNA, 15304 bp, Homo Sapiens
gaggcgaggcggccgggccctgcgcgtcaggcctgagacctgggaggaagctggagaaaagatgccctctgaatctttctgtttggctgcccaggctcgcctcgactccaaatggttgaaaacagatatacagcttgcattcacaagagatgggctctgtggtctgtggaatgaaatggttaaagatggagaaattgtatacactggaacagaatcaacccagaacggagagctccctcctagaaaagatgatagtgtcgaaccaagtggaacaaagaaagaagatctgaatgacaaagagaaaaaagatgaagaagaaactcctgcacctatatatagggccaagtcaattctggacagctgggtatggggcaagcaaccagatgtgaatgaactgaaggagtgtctttctgtgctggttaaagagcagcaggccctggccgtccagtcagccaccaccaccctctcagccctgcgactcaagcagaggctggtgatcttggagcgctatttcattgccttgaatagaaccgtttttcaggagaatgtcaaagttaagtggaaaagcagcggtatttctctgcctcctgtggacaaaaaaagttcccggcctgcgggcaaaggtgtggaggggctcgccagagtgggatcccgagcggcgctgtcttttgcctttgccttcctgcgcagggcctggcgatcaggcgaggatgcggacctctgcagtgagctgttgcaggagtccctggacgccctgcgagcacttcccgaggcctcgctctttgacgagagcaccgtgtcctctgtgtggctggaggtggtggagagagcgaccaggttcctcaggtccgtcgtgacgggggatgttcacggaacgccagccaccaaagggccaggaagcatccccctgcaggaccagcacttggccctggccatcctgctggagctggctgtgcagagaggcacgctgagccaaatgttgtctgccatcctgttgttgcttcagctgtgggacagcggggcacaggagactgacaatgagcgttccgcccagggcaccagcgccccacttttgcccttgctgcaaaggttccagagcatcatttgcaggaaggatgcaccccactccgagggcgacatgcaccttttgtctggccctctgagccccaatgagagtttcctgaggtacctcacccttccacaagacaacgagcttgccattgatctgcgacaaacggcggttgttgtcatggcccatttagaccgtctggctacgccctgtatgcctccgctgtgtagctctccgacatctcataagggatcattgcaagaggtcataggttgggggttaataggatggaaatactatgccaatgtgattggtccaatccagtgcgaaggcctggccaacctgggagtcacacagattgcctgtgcagagaagcgtttcctgattctgtcacgcaatggccgcgtgtacacacaggcctataatagtgacacgctggccccacagctggtccaaggccttgcctccagaaacattgtaaaaattgctgcccattctgatggtcaccactacctagccttggctgctactggagaggtgtactcctggggctgtggggacggcggacggctgggccatggggacactgtgcctttggaggagcctaaggtgatctccgccttctctggaaagcaggccgggaagcacgtggtgcacatcgcttgcgggagcacttacagtgcggccatcactgccgagggggagctgtacacctggggccgcgggaactacggccggctgggccatggctccagtgaggacgaggccattccgatgctggtagccgggcttaaaggactgaaggtcatcgatgtggcgtgtgggagtggggatgctcaaaccctggctgtcactgagaacgggcaagtgtggtcttggggagatggtgactatgggaaattgggcagaggtggtagtgatggctgcaaaaccccaaagctgattgaaaagcttcaagacttggatgtggtcaaagtccgctgtggaagtcagttttccattgctttgacgaaagatggccaagtttattcatggggaaaaggtgacaaccagagacttggacatggaacagaggaacatgttcgttatccaaaactcttagaaggcttgcaagggaagaaggtgattgatgtggctgcaggctccacccactgcctggctctgactgaggacagcgaggtccacagctgggggagcaacgaccagtgccagcactttgacaccttgcgcgtgaccaagccagaacctgcagcattgccaggactggacaccaaacacatagtgggaattgcctgtgggcctgcccagagctttgcttggtcatcatgttctgagtggtccattggcctccgtgtcccttttgtggtggacatctgctcaatgacttttgagcagctagatctcctgcttcggcaggtgagtgaggggatggatggctccgcggactggcccccgccccaggagaaagagtgtgtggccgtggcaacgctgaatcttctacgacttcagttgcatgctgccattagtcaccaggttgacccggaattccttggtttaggtctgggcagcatcctcctgaacagcctgaagcagacggtggtgaccctggccagcagtgcgggcgtgctgagcaccgtgcagtcggccgcccaggccgtgctgcagagtggctggtccgtgctgctgcccaccgcggaggagcgggcccgggcactctctgctctcctgccctgcgcagtttcaggcaatgaagtgaacataagtccaggtcgtcgattcatgattgatcttctggtgggcagcttgatggctgatggagggttggagtcagccttacacgcagccattactgcagagatccaggatattgaagccaaaaaagaagcacagaaggaaaaagaaattgatgaacaggaagcgaatgcctcaacatttcatagaagcaggactccactggataaagaccttattaatacggggatctgtgagtcttctggcaaacagtgtttgcctctggttcagctcatacaacagcttcttagaaacatcgcttctcagactgtagccagattgaaagatgttgcccgtcggatttcatcatgtctggactttgagcaacacagtcgtgaaagatctgcttcattggattggttactgcgtttccaacgtttgcttattagtaaactttatccaggagaaagtattggtcagacctcagatatttctagtccagagctaatgggtgttggttccttgctgaagaagtacacagccctcctgtgcacgcacattggagatatactgcctgtggccgccagcattgcttctaccagctggcggcacttcgcggaggtggcttacattgtggaaggggactttactggtgttctccttccagaactagtagtttctatagtgcttctgctcagtaaaaatgctgatctcatgcaagaggctggagctgtacctctgctgggtggcctgttggaacatctggatcggttcaaccatctggcaccaggaaaggaacgggatgatcatgaagagttagcctggcctggcataatggagtcattttttacaggtcagaactgtagaaataatgaggaagtgacacttatacgcaaagctgatttggagaaccataataaagatggaggcttctggactgtgattgacgggaaggtgtatgatataaaggacttccagacacagtcgttaacaggaaatagtattcttgctcagtttgcaggggaagacccagtggtagctttggaagctgctttgcagtttgaagacacccgggaatccatgcacgcgttttgtgttggccagtatttggagcctgaccaagaaatcgtcaccataccagatctggggagtctctcttcacctctgatagacacagagaggaatctgggcctgcttctcggattacacgcttcgtatttggcaatgagcacaccgctgtctcctgtcgagattgaatgtgccaaatggcttcagtcatccatcttctctggaggcctgcagaccagccagatccactacaggtacaacgaggagaaagacgaggaccactgcagctccccagggggcacacctgccagcaaatctcgactctgctcccacagacgggccctgggggaccattcccaggcatttctgcaagccattgcagacaacaacattcaggatcacaacgtgaaggactttttgtgtcaaatagaaaggtactgtaggcagtgccatttgaccacaccgatcatgtttccccccgagcatcccgtggaagaggtcggtcgcttgttgttatgttgcctcttaaaacatgaagatttaggtcatgtggcattatctttagttcatgcaggtgcacttggtattgagcaagtaaagcacagaacgttgcctaagtcagtggtggatgtttgtagagttgtctaccaagcaaaatgttcgctcattaagactcatcaagaacagggccgttcttacaaggaggtctgcgctcctgtcatcgaacgtttgagattcctctttaatgaattgagacctgctgtttgtaatgacctctctataatgtctaagtttaaattgttaagttctttgccccgttggaggaggatagctcaaaagataattcgagaacgaaggaaaaagagagttcctaagaagccagaatctatggatgatgaagaaaaaattggaaacgaagagagtgatttagaagaagcttgcattttgcctcatagtccaataaatgtggacaagagacccattgcaattaaatcacccaaggacaaatggcagccgctgttgagtactgttacaggtgttcacaaatacaagtggttgaagcagaatgtgcagggtctttatccgcagtctccactcctcagtacaattgctgaatttgcccttaaagaagagccagtggatgtggaaaaaatgagaaagtgcctactaaaacagttggagagagcagaggttcgcctggaagggatagatacaattttaaaactggcgagcaagaatttcttacttccatctgtgcagtatgcgatgttttgtggatggcaaagacttattcctgagggaatcgatataggggaacctcttactgattgtttaaaggatgttgatttgatcccgccttttaatcggatgctgctggaagtcacctttggcaagctgtacgcttgggctgtacagaacattcgaaatgttttgatggatgccagtgccacatttaaagagcttggtatccagccggttcccctccaaaccatcaccaatgagaacccgtcaggaccgagcctggggaccatcccgcaagcccgcttcctcctggtgatgctcagcatgctcaccctgcagcacggcgcaaacaacctcgaccttctgctcaattccggcatgctggccctcacgcagacggcactgcgcctgattggccccagttgtgacaacgttgaggaagatatgaatgcttctgctcaaggtgcttctgccacagttttggaagaaacaaggaaggaaacggctcctgtgcagctccctgtttcaggaccagaactggctgccatgatgaagattggaacaagggtcatgagaggtgtggactggaaatggggcgatcaggatgggcctcctccaggcctaggccgcgtgattggtgagctgggagaggacggatggataagagtccagtgggacacaggcagcaccaactcctacaggatggggaaagaaggaaaatacgacctcaagctggcagagctgccggctgctgcacagccctcagcagaggattcggacacagaggatgactctgaagccgaacaaactgaaaggaacattcaccccactgcaatgatgtttaccagcactattaacttactgcagactctttgtctgtctgctggagttcatgctgagatcatgcagagcgaagccaccaagactttatgcggactgctgcgaatgttagtggaaagcggaacgacggacaagacatcttctccaaacaggctggtgtacagggagcaacaccggagctggtgcacgctggggtttgtgcggagcatcgctctcacgccgcaggtatgcggcgccctcagctccccgcagtggatcacgctgctcatgaaggtcgtggaagggcacgcacccttcactgccacctcgctgcagaggcagatcttagctgtgcatttgttgcaagcagtccttccatcatgggacaagaccgaaagggcgagggacatgaaatgcctcgtggagaagctgtttgacttcttgggaagcttgctcactacctgctcctctgacgtgccattactcagagagtccacgctgaggcggcgcagggtgcgcccgcaggcctcgctgactgccacccacagcagcacactggcggaggaggtggtggcactgctgcgcacgctgcactccctgactcagtggaatgggctcatcaacaagtacatcaactcccagctccgctccatcacccacagctttgtgggaaggccttccgaaggggcccagttagaggactacttccccgactccgagaaccctgaagtggggggcctcatggcagtcctggctgtgattggaggcatcgatggtcgcctgcgcctgggcggtcaagttatgcacgatgagtttggagaaggcactgtgactcgcatcaccccaaagggcaaaatcaccgtgcagttctctgacatgcggacgtgtcgcgtttgcccattgaatcagctgaaaccactccctgccgtggcctttaatgtgaacaacctgcccttcacagagcccatgctgtctgtctgggctcagttggtgaacctcgctggaagcaagttagaaaagcacaaaataaagaaatcgactaaacaggcctttgcaggacaagtggacctggacctgctgcggtgccagcagttgaagctatacatcctgaaagcaggtcgggcgctgctctcccaccaggataaactgcggcagatcctgtctcagccagctgttcaggagactggaactgttcacacagatgatggagcagtggtatcacctgaccttggggacatgtctcctgaagggccgcagccccccatgatcctcttgcagcagctgctggcctcggccacccagccgtctcctgtgaaggccatatttgataaacaggaacttgaggctgctgcactggccgtttgccagtgcttggctgtggagtccactcacccttcgagcccaggatttgaagactgcagctccagtgaggccaccacgcctgtcgccgtgcagcacatccaccctgccagagtgaagaggcgcaagcagtcgcccgttcccgctctgccgatcgtggtgcagctcatggagatgggattttccagaaggaacatcgagtttgccctgaagtctctcactggtgcttccgggaatgcatccagcttgcctggtgtggaagccttggtcgggtggctgctggaccactccgacatacaggtcacggagctctcagatgcagacacggtgtccgacgagtattctgacgaggaggtggtggaggacgtggatgatgccgcctactccatgtctactggtgctgttgtgacggagagccagacgtacaaaaaacgagctgatttcttgagtaatgatgattatgctgtatatgtgagagagaatattcaggtgggaatgatggttagatgctgccgagcgtatgaagaagtgtgcgaaggtgatgttggcaaagtcatcaagctggacagagatggattgcatgatctcaatgtgcagtgtgactggcagcagaaagggggcacctactgggttaggtacattcatgtggaacttataggctatcctccaccaagttcttcttctcacatcaagattggtgataaagtgcgggtcaaagcctctgtcaccacaccaaaatacaaatggggatctgtgactcatcagagtgtgggggttgtgaaagctttcagtgccaatggaaaagatatcattgtcgactttccccagcagtctcactggactgggttgctatcagaaatggagttggtacccagtattcatcctggggttacgtgtgatggatgtcagatgtttcctatcaatggatccagattcaaatgcagaaactgtgatgactttgatttttgtgaaacgtgtttcaagaccaaaaaacacaataccaggcatacatttggcagaataaatgaaccaggtcagtctgcggtattttgtggccgttctggaaaacagctgaagcgttgccacagcagccagccaggcatgctgctggacagctggtcccgcatggtgaagagcctgaatgtgtcgtcctccgtgaaccaggcatcccgtctcattgacggcagcgagccctgctggcagtcatcggggtcgcaaggaaagcactggattcgtttggagattttcccagatgttcttgttcatagattaaaaatgatcgtagatcctgctgacagtagctacatgccgtccctggttgtagtgtcaggtggaaattccctgaataaccttattgaactaaagacaatcaatattaacccttctgacaccacagtgccccttctgaatgactacacagagtatcacaggtatattgaaattgctataaagcagtgcaggagctcaggaatcgattgtaaaatccatggtctcatcctgctgggacggatccgtgcagaagaggaagatttggctgcagttcctttcttagcttcggataatgaagaggaggaggatgagaaaggcaacagcggaagcctcattagaaagaaggctgctgggctggaatcagcagctacgataagaaccaaggtgtttgtgtggggcctgaatgacaaggaccagctgggcgggctgaaaggctccaagataaaggttccttcgttctctgagacactgtcagctttgaatgtggtacaggtggctggtggatctaaaagtttgtttgcagtgactgtggaagggaaggtgtatgcctgtggagaagccacgaatggccggctggggctgggcatttccagcgggacggtgcccatcccacggcagatcacagctctcagcagctacgtggtcaagaaggtggctgttcactcaggtggccggcacgcgacggctttaactgtcgatggaaaagtgttttcgtggggcgaaggtgacgatggaaaacttggacacttcagcagaatgaactgtgacaaaccaaggctgatcgaggccctgaaaaccaagcgtatccgggatatcgcctgtgggagctcgcacagcgcagccctcacatccagcggagaactgtacacctggggcctcggcgagtacggccggctgggacatggggataatacgacacagctaaagcccaaaatggtgaaagtccttctcggtcacagagtaatccaggttgcatgtgggagtagagacgcgcagaccctggctctgaccgatgaaggtttggtattttcctggggtgatggtgactttggaaaactgggccggggcggaagtgaaggctgtaacattccccagaacattgagagactaaatggacagggggtgtgccagattgagtgtggagctcagttctccctggcgctcaccaagtctggagtggtgtggacatggggaaagggggattacttcagattgggccacggctctgacgtgcacgtgcggaaaccacaggtggtggaagggctgagagggaagaagatcgtgcatgtggctgtcggggccctgcactgcctggcggtcacggactcggggcaggtgtatgcttggggtgacaacgaccacggccagcagggcaatggcacgaccacggttaacaggaagcccacactcgtgcaaggcttagaaggccagaagatcacacgcgtggcttgtgggtcgtcccacagtgtggcgtggacaactgtggatgtggccacgccctctgtccacgagcccgtcctcttccagactgcaagagacccgttaggtgcttcctacttaggcgtgccctcagatgctgattcttctgctgccagtaataaaataagtggtgcaagtaattctaagccaaatcgcccttctcttgccaagattctcttgtcattggatggaaatctggccaaacagcaggccttatcgcatattcttacagcattgcaaatcatgtatgccagagatgctgttgtcggggccctgatgccggccgccatgatcgccccggtggagtgcccctcgttctcctcggcggccccttccgacgcatctgcgatggctagtcccatgaatggagaagaatgcatgctggctgttgatatcgaagacagactgagtccaaatccatggcaagaaaagagagagattgtttcctctgaggacgcagtgaccccctctgcagtgactccgtcggccccctcagcctccgctcggccttttatcccagtgacggatgacctgggagctgcaagcatcattgcagaaaccatgaccaaaaccaaagaggatgttgaaagccaaaataaagcagcaggtccggagcctcaggccttggatgagttcaccagtctgctgattgcggatgacactcgtgtggtggtagacctgctcaagctgtcagtgtgcagccgggccggggacaggggcagggatgtgctctccgcggtgctttccggcatggggaccgcctacccacaggtggcagatatgctgttggagctctgtgtcaccgagttggaggatgtggccacagactcgcagagcggccgcctctcttctcagcctgtggtggtggagagtagccacccttacaccgacgacacctccaccagtggcacagtgaagataccaggtgcagaaggactcagggtagaatttgaccggcagtgctccacagagaggcgccacgaccctctcacagtcatggacggcgtcaacaggatcgtctccgtgcggtcaggccgagagtggtccgactggtccagcgagctgcgcatcccaggggatgagttaaagtggaagttcatcagcgatgggtctgtgaatggctggggctggcgcttcaccgtctatcccatcatgccagctgctggccctaaagaactcctctctgaccgctgcgtcctctcctgtccatccatggacttggtgacgtgtctgttagacttccgactcaaccttgcctctaacagaagcatcgtccctcgccttgcggcctcgctggcagcttgtgcacagctgagtgccctagctgccagtcacagaatgtgggcccttcagagactgaggaagctgcttacaactgaatttgggcagtcaattaacataaataggctgcttggagaaaatgatggggaaacaagagctttgagttttacaggtagtgctcttgctgctttggtgaaaggtcttccagaagctttgcaaaggcagtttgaatatgaagatcctattgtgaggggtggcaaacagctgctccacagcccattctttaaggtactagtagctcttgcttgtgacctggagctggacactctgccttgctgtgccgagacgcacaagtgggcctggttccggaggtactgcatggcctcccgtgttgctgtggcccttgacaaaagaacaccgttgccccgtctgtttcttgatgaggtggctaagaaaattcgtgaattaatggcagacagcgaaaacatggatgttctgcatgagagccatgacatttttaaaagagagcaagacgaacaacttgtgcagtggatgaacaggcgaccagatgactggactctctctgctggtggcagtggaacaatttatggatggggacataatcacaggggccagctcgggggcattgaaggcgcaaaagtcaaagttcccactccctgtgaagcccttgcaactctcagacccgtgcagttaatcggaggggaacagaccctctttgctgtgacggctgatgggaagctgtatgccactgggtatggtgcaggtggcagactaggcattggagggacagagtcggtgtccaccccaacattgcttgaatccattcagcatgtgtttattaagaaagtagctgtgaactctggaggaaagcactgccttgccctgtcttcagaaggagaagtttactcttggggtgaggcagaagatgggaagttggggcatggcaacagaagtccgtgtgaccgccctcgtgtcatcgagtctctgagaggaattgaagtggtcgatgttgctgctggcggagcccacagcgcctgtgtcacagcagccggggacctctacacatggggcaaaggccgctacggccggctggggcacagcgacagtgaggaccagctgaagccgaagctggtggaggcgctgcagggccaccgtgtggttgacatcgcctgtggcagtggagatgcccagaccctctgcctcacagatgacgacactgtctggtcctggggggacggggactacggcaagctcggccggggaggcagcgatggctgtaaagtgcctatgaagattgattctcttactggtcttggagtagttaaagtggaatgcggatcccagttttctgttgcccttaccaaatctggagctgtttatacctggggcaaaggcgattatcacaggttgggccatggatcagatgaccatgttcgaaggcctcggcaggtccaagggttgcaggggaagaaagtcatcgccatcgccactggctccctgcactgtgtgtgctgcacagaggatggtgaggtttatacatggggcgacaatgatgagggacaactgggagacggaaccaccaatgccatccagaggcctcggttggtagctgcccttcagggtaagaaggtcaaccgtgtggcctgtggctcagcacataccctcgcctggtcgaccagcaagcccgccagtgctggcaaactccctgcacaggtccccatggagtacaatcacctgcaggagatccccatcattgcgctgaggaaccgtctgctgctgctgcaccacctctccgagctcttctgcccctgcatccccatgttcgacctggaaggctcgctcgacgaaactggactcgggccttctgttgggttcgacactctccgaggaattctgatatcccagggaaaggaggcggctttccggaaagtagtacaagcaactatggtacgcgatcgtcagcatggccccgtcgtggagctgaaccgcatccaggtcaaacgatcaaggagcaaaggcgggctggccggccccgacggcaccaagtctgtctttgggcagatgtgtgctaagatgagctcgtttggtcccgacagcctcctccttcctcaccgtgtctggaaagtcaagtttgtgggtgaatctgtggatgactgtgggggcggctacagcgagtccatagctgagatctgtgaggagctgcagaacggactcacgcccctgctgatcgtgacacccaacgggagggatgagtctggggccaaccgagactgctacctgctcagcccggccgccagagcacccgtgcacagcagcatgttccgcttcctgggtgtgttgctgggcattgccatccgaaccgggagtcccctgagcctcaaccttgccgagcctgtctggaagcagctggctgggatgagcctcaccatcgcggacctcagtgaggttgataaggattttattcctggactcatgtacatccgagacaatgaagccacctcagaggagtttgaagccatgagcctgcccttcacagtgccaagtgccagtggccaggacattcagttgagctccaagcacacacacatcaccctggacaaccgcgcggagtacgtgcggctggcgataaactatagactccatgaatttgatgagcaggtggctgctgttcgggaaggaatggcccgcgttgtgcctgttcccctcctctctctgttcaccggctacgaactggagacgatggtgtgtggcagccctgacatcccgctgcaccttctcaagtcggtggccacctataaaggcatcgagccttccgcatcgctgatccagtggttctgggaggtgatggagtccttctccaacacagagcgctctcttttccttcgcttcgtctggggccggacgaggctgcccaggaccatcgccgacttccggggccgagacttcgtcatccaggtgttggataaatacaaccctccagaccacttcctccctgagtcctacacctgtttcttcttgctgaagctgcccaggtattcctgcaagcaggtgctggaggagaagctcaagtacgccatccacttctgcaagtccatagacacagatgactacgctcgcatcgcacttacaggagagccagccgccgacgacagcagcgacgattcagataacgaggatgtcgactcctttgcttcggactctacacaagattatttaacaggacactaagatggggaaacgtcctcgtgagatgagagcctgagccaggcagcagagcactcgctgctgtgtagactgtaggctgcctggtgtgtctgatgagaagcgtccgtcctcgagccaggcgggaggagggagtggagagactgactggccgtgatgggaatgacagtgagaaggtccgcctgtgcgcgtggaacactgtggacgctcgacttccaagggtcttctcacccgtaatgctgcattacatgtaggactgtgtttactaaagtgtgtaaatgtttatataaataccaaattgcagcatccccaaaatgaataaagcctttttacttgtgggtgcaatcgatttttttttctttctcctttctttcaagtgtcgtgagtcgtcttgattgtatattggaaataactgtgtaacaaatcgtattataaatatttcaattaattttactctgaatttgtttattaaaagacttttgaacatgaaatgattagtattacttgaatgcatccagaggatatttaaaccaaaatgaaaaaccagaaggccatttggtgtcccctctcccaggtgtccccttgtagcatatgcattatgtcatctgaattgaggcctttctgtgaacagcatcataacttctatcatggaaagtgtactatatataatgtttgtgtcatgtatatgcctaaattttaatcatctataaataaaacatctgacataaaaaaaaaaaaaaaaaa

SEQ ID NO: 22898 - DNA, 2390 bp, Homo Sapiens
tagtggatcccccgggctgcaggaattcggcacgagtcggagggaggttcgggtgggcatcgggcggctggaagagctcgactcgtcccgctgggaaagcgcgagtctgagtggaaccctggacgacttgcagagcggctggcgcagtcatggcggactactggaagtcacagccaaagaaattctgtgattactgcaagtgctggatagcagacaataggcctagtgttgaatttcatgaaagaggaaagaatcataaggaaaatgtggcaaaaaggatcagtgagattaaacagaaaagcctggataaggcaaaggaagaagaaaaggcatcaaaggagtttgctgcaatggaggcagctgccctgaaagcataccaagaggatttgaaaagacttggcttagagtcagaaattttggagccaagcataacaccagtaaccagcactatcccacctacctcgacatcaaatcaacagaaagaaaagaaagaaaagaagaaaagaaaaaaagatccttcaaagggcagatgggtagaaggcataacctctgagggttaccattactattatgatcttatctcaggagcatctcagtgggagaaacctgaaggatttcaaggagacttaaaaaagacagcagtgaagaccgtttgggtagaaggtttaagtgaagatggttttacctattactataatacagaaacaggagaatccagatgggagaaacctgatgatttcattccacacactagtgatctgccttctagtaaggtcaatgaaaattcacttggcaccctagatgaatccaaatcatcagattcgcatagtgattctgatggggaacaggaagcagaagaaggaggggtctctacagagacagaaaagccaaaaataaagtttaaggaaaaaaataaaaatagtgatggaggaagtgacccagaaacacagaaagaaaaaagtattcagaaacagaattcattaggttcaaatgaagaaaaatcgaaaactcttaagaaatcaaacccatatggagaatggcaagaaattaaacaagaggttgagtctcatgaggaggtagatttggaacttccaagcactgaaaatgagtatgtatcaacttcagaagctgatggtggcggagaacccaaagtggtatttaaagaaaaaacagtcacttctcttggagttatggcagatggagtggccccagtcttcaaaaagagaagaactgaaaatggaaaatctagaaatttaaggcaacgaggtgatgatcaatagttgcaggagagctttttgtacatgcttttaggacagaatggagacttatacacccaaagtttatctgtgtttgtttgtaagtattatgatgctaaaaatttagatttattctaaatgtatttgatgtgaattaaaataaatattttttcatgtgaaatttattttggttcctaaaatggaagcctaccacattgcattgtaatacagtgtattatgttcagtgtctaaaaactgctaattaagtcataatttaagatgctatgtatctgttatttaaaacatggagaaacagggcctttattccattcatattcataagagcatatttatcctgcattgaaaatgcattacttttgcacattgatattaactgttgtccaacaaataagtatcggagtacgtgagaatattcccagcccagtgatgatttggttctgaggctgatgtgagaaagctgatgtaaaaaatgtatgcatattggcttaccttactcaatttaaagtcaaaagccaacagccaggagcagctcaggtacttcagatgtgcttaatatggagtgaaaactggaccagaggtggaaagatgtatttgccccagttcacttcaaagcagcaaacgttgtttaagcattttagtttgaaccaggcattgtgttaggaatccagggataaagatgaatgaaatgtatttctgttcttcaggagttcacattctagcayatgccttttttcccccagtcatgcactctttttagcagtcttatatgtactagaaaagattttttaaagtttatttaaagctgtgtagatgaaggcttgatctaaaatagtataaggtctccagcttcagtaaaagtttttagtgtttacttaaattagtaatttctcactttctgtctggttaaaatgtcttaaaaagtagaattttcttctttaatccgtttagtagttacctcccttttacttttcaaattcacaaaattacatttctcataaattgtatagtatttaacttataatagttaatatttgtctttttaagatgactgtacatgtaagaaaaaagcttattaaaaacttgatcaaagaaaaaaaaaaaaaaaaaaaaaaa

SEQ ID NO: 22899 - DNA, 6788 bp, Homo Sapiens
gcggccgcgtcgacggcggccttcgggatcttgagctacgaacaccggcccctgaagcggccgcggctggggcctcccgatgtttaccctcaggaccccaaacagaaggaggatgaactgacggccttgaatgtaaaacaaggtttcaataaccagcctgctgtctctggggatgagcatggcagtgccaagaacgtcagcttcaatcctgccaagatcagttccaacttcagcagcattattgcagagaaattacgttgtaatacccttcctgacactggtcgcaggaagccccaagtgaaccagaaggataacttctggctggtgactgcacgatcccagagtgccattaacacttggttcactgacttggctggcaccaagccactcacgcaactagccaaaaaggtccccattttcagtaagaaggaagaggtgtttgggtacttagccaaatacacagtgcctgtgatgcgggctgcctggctcattaagatgacctgtgcctactatgcagcaatctctgagaccaaggttaagaagagacatgttgaccctttcatggaatggactcagatcatcaccaagtacttatgggagcagttacagaagatggctgaatactaccggccagggcctgcaggaagtgggggctgtggttccacgatagggcccttgccccatgatgtagaggtggcaatccggcagtgggattacaccgagaagctggccatgttcatgtttcaggatggaatgctggacagacatgagttcctgacctgggtgcttgagtgttttgagaagatccgccctggagaggatgaattgcttaaactgctgctgcctctgcttctccgatactctggggaatttgttcagtctgcatacctgtcccgccggcttgcctacttctgtacacggagactggccctgcagctggatggtgtgagcagtcactcatctcatgttatatctgctcagtcaacaagcacgctacccaccacccctgctcctcagcccccaactagcagcacaccctcgactccctttagtgacctgcttatgtgccctcagcaccggcccctggtttttggcctcagctgtatcctacagaccatcctcctgtgctgtcctagtgccttggtttggcactactcactgactgatagcagaattaagaccggctcaccacttgaccacttgcctattgccccgtccaacctgcccatgccagagggtaacagtgccttcactcagcaggtccgtgcaaagttgcgggagatcgagcagcagatcaaggagcggggacaggcagttgaagttcgctggtctttcgataaatgccaggaagctactgcaggcttcaccattggacgggtacttcatactttggaagtgctggacagccatagttttgaacgctctgacttcagcaactctcttgactccctttgtaaccgaatctttggattgggacctagcaaggatgggcatgagatctcctcagatgatgatgctgtggtgtcattgctatgtgaatgggctgtcagctgcaagcgttctggtcggcatcgtgctatggtggtagccaagctcctggagaagagacaggcggagattgaggctgagcgttgtggagaatcagaagccgcagatgagaagggttccatcgcctctggctccctttctgctcccagtgctcccattttccaggatgtcctcctgcagtttctggatacacaggctcccatgctgacggaccctcgaagtgagagtgagcgggtggaattctttaacttagtactgctgttctgtgaactgattcgacatgatgttttctcccacaacatgtatacttgcactctcatctcccgaggggaccttgcctttggagcccctggtccccggcctccctctccctttgatgatcctgccgatgacccagagcacaaggaggctgaaggcagcagcagcagcaagctggaagatccagggctctcagaatctatggacattgaccctagttccagtgttctctttgaggacatggagaagcctgatttctcattgttctcccctactatgccctgtgaggggaagggcagtccatcccctgagaagccagatgtcgagaaggaggtgaagcccccacccaaggagaagattgaagggacccttggggttctttacgaccagccacgacacgtgcagtacgccacccattttcccatcccccaggaggagtcatgcagccatgagtgcaaccagcggttggtcgtactgtttggggtgggaaagcagcgagatgatgcccgccatgccatcaagaaaatcaccaaggatatcttgaaggttctgaaccgcaaagggacagcagaaactgaccagcttgctcctattgtgcctctgaatcctggagacctgacattcttaggtggggaggatgggcagaagcggcgacgcaaccggcctgaagccttccccactgctgaagatatctttgctaagttccagcacctttcacattatgaccaacaccaggtcacggctcaggtctcccggaatgttctggagcagatcacgagctttgcccttggcatgtcataccacttgcctctggtgcagcatgtgcagttcatcttcgacctcatggaatattcactcagcatcagtggcctcatcgactttgccattcagctgctgaatgaactgagtgtagttgaggctgagctgcttctcaaatcctcggatctggtgggcagctacactactagcctgtgcctgtgcatcgtggctgtcctgcggcactatcatgcctgcctcatcctcaaccaggaccagatggcacaggtctttgaggggctgtgtggcgtcgtgaagcatgggatgaaccggtccgatggctcctctgcagagcgctgtatccttgcttatctctatgatctgtacacctcctgtagccatttaaagaacaaatttggggagctcttcagcgacttttgctcaaaggtgaagaacaccatctactgcaacgtggagccatcggaatcaaatatgcgctgggcacctgagttcatgatcgacactctagagaaccctgcagctcacaccttcacctacacggggctaggcaagagtcttagtgagaaccctgctaaccgctacagctttgtctgcaatgcccttatgcacgtctgtgtggggcaccatgatcccgatagggtgaatgacatcgcaatcctgtgtgcagagctgaccggctattgcaagtcactgagtgcagaatggctaggagtgcttaaggccttgtgctgctcctctaacaatggcacttgtggtttcaacgatctcctctgcaatgttgatgtcagtgacctatcttttcatgactcgctggctacttttgttgccatcctcatcgctcggcagtgtttgctcctggaagatctgattcgctgtgctgccatcccttcactccttaatgctgcttgtagtgaacaggactctgagccaggggcccggcttacctgccgcatcctccttcaccttttcaagacaccgcagctcaatccttgccagtctgatggaaacaagcctacagtaggaatccgctcctcctgcgaccgccacctgctggctgcctcccagaaccgcatcgtggatggagccgtgtttgctgttctcaaggctgtgtttgtacttggggatgcggaactgaaaggttcaggcttcactgtgacaggaggaacagaagaacttccagaggaggagggaggaggtggcagtggtggtcggaggcagggtggccgcaacatctctgtggagacagccagtctggatgtctatgccaagtacgtgctgcgcagcatctgccaacaggaatgggtaggagaacgttgccttaagtctctgtgtgaggacagcaatgacctgcaagacccagtgttgagtagtgcccaggcgcagcgcctcatgcagctcatttgctatccacatcgactgctggacaatgaggatggggaaaacccccagcggcagcgcataaagcgcattctccagaacttggaccagtggaccatgcgccagtcttccttggagctgcagctcatgatcaagcagacccctaacaatgagatgaactccctcttggagaacatcgccaaggccacaatcgaggttttccaacagtcagcagagacagggtcatcttctggaagtactgcaagcaacatgcccagcagcagcaagaccaagcctgtgctcagctctctagagcgctctggtgtatggctggtggcccccctcattgctaaactgcccacctcagtccagggacatgtgttaaaggctgctggggaagaattggagaagggtcagcacctgggttcctcttcacgcaaagaacgtgatcgacaaaagcagaagagcatgtccctattgagccagcagcccttcttatcgctggtgctaacatgtctgaaagggcaggatgaacaacgcgagggactccttacctccctctacagccaggtgcaccagattgtgaataattggcgagatgaccagtacttagatgattgcaaaccaaagcagcttatgcatgaggcactcaaactgcggctcaacctggtggggggcatgtttgacacggtgcagcgcagcacccagcagaccacggagtgggccatgctcctcctggagatcatcatcagcggcactgtcgacatgcagtccaacaatgagctcttcactactgtgttggacatgctgagcgtgctcatcaatgggacattggctgcagacatgtctagcatctcgcaaggtagcatggaggaaaacaagcgtgcatacatgaacctggcgaagaagttgcagaaggagttgggggagcgccagtcagacagtctggaaaaggttcgccagctgctgccactgcccaagcagacccgagatgtcatcacgtgtgagccacagggctcccttatcgataccaagggcaacaagattgctggcttcgattccatcttcaagaaggagggtctacaggtttccaccaaacagaagatctcgccctgggatctttttgaggggttgaagccgtcagcaccactctcttggggctggtttggaacagtccgagtggaccggcgagtggctcgaggagaggagcagcagcggttgctgctctaccacacacacctgaggccccggccccgcgcctattacctggagccactgccactgcccccagaagatgaggagccgcctgctcctaccctgctagagcctgagaaaaaggctccagagccccccaaaactgacaaaccgggggctgctccacccagtactgaggaacgcaagaagaagtccaccaagggcaagaaacgcagccagccagctaccaagacagaggactatggaatgggcccgggtcggagcggcccttatggtgtgacagtgcctccggacctcctgcaccacccaaaccctggttctataacacaccttaactacaggcaaggctccataggcctgtacacccagaaccagccactacctgcaggtggccctcgtgtggacccataccgtcctgtgcgcttaccaatgcagaagctgcccacccgaccaacttaccctggagtgctgcccacaaccatgactggcgtcatgggtttagaaccctcctcttataagacctctgtgtaccggcagcagcaacctgcggtgccccaaggacagcgccttcgccaacagctccagagtcagggcatgttgggacagtcatctgtccatcagatgactcccagctcttcctacggtttgcagacttcccagggctatactccttatgtttctcatgtgggattgcagcaacacacaggccctgcaggtaccatggtgccccccagctactccagccagccttaccagagcacccacccttctaccaatcctactcttgtagatcctacccgccacctgcaacagcggcccagtggctatgtgcaccagcaggcccccacctatggacatggactgacctccactcaaaggttttcacaccagacactgcagcagacacccatgataagtaccatgactccaatgagtgcccagggcgtccaggcaggcgtccgttcaacagccatcctacctgagcagcagcagcagcagcaacagcagcaacagcaacagcagcagcagcagcaacagcaacagcagcagcagcagcagcagtaccacatccggcagcagcagcagcagcagatcctgcggcagcagcagcaacagcaacagcagcagcagcagcagcagcaacagcaacagcagcagcagcaacagcaacaacagcaacaccagcagcaacagcagcaacaggcggctcctccccaaccccagccccagtcccagccccagttccagcgccaggggcttcagcagacccagcagcagcaacagacagcagctttggtccggcaacttcaacaacagctctctaatacccagccacagcccagtaccaacatatttggacgctactgagccacctggaggaactgcttgtgcactggatgtggccccaccctttcctcttaattcccaatcccattcctgggctagcaccagtagtggttggggccctcccctcaggctccatttttaataagtttttagtatttttgttaatgtgaggcattgagctgttgggttttgtatattatttatatagagaccccagagctgttgcacccaatacacagagcttctttgcaaaaaaaaaaaaaaaa

SEQ ID NO: 22900 - DNA, 7418 bp, Homo Sapiens
tgttctaagaacggaagcatctgggctggatggaatttagcatcaagcagagtcccctttctgttcagagtgttgtaaagtgcataaagatgaagcaggcaccagaaatcctcggcagtgccaacgggaagactccgagctgcgaggtgaaccgcgagtgttctgtgttcctcagcaaagcccagctctccagtagcctgcaggagggggtcatgcagaagtttaacggccacgacgccctgccctttattccagccgacaagctgaaagatcttacttcccgggtgtttaatggagaacccggcgcacacgatgccaaactgcgttttgagtcccaggaaatgaaagggattgggacaccccctaacactacccctatcaaaaatggctctccagaaattaagctgaaaatcaccaaaacatacatgaatgggaagcctctctttgaatcttccatttgtggtgacagtgctgctgatgtgtctcagtcagaagaaaatggacaaaaaccagaaaacaaggcgagaaggaacaggaagaggagcataaaatatgactccttgctggagcagggccttgtcgaagcagctcttgtgtctaagatctcaagtccttcagataaaaagattccagctaagaaagagtcttgtccaaacactggaagagacaaagaccacctgttgaaatacaacgttggtgatttggtgtggtccaaagtgtcgggttacccttggtggccttgcatggtttctgcagatccactccttcacagctataccaaacttaaaggtcagaaaaagagtgcacgccagtatcacgtacagttctttggtgacgccccagaaagagcttggatatttgagaagagcctcgtagcttttgaaggagaaggacagtttgaaaaattatgccaggaaagtgccaagcaggcacccacgaaagctgagaaaattaagctattgaaaccaatttcagggaaattgagggcccagtgggaaatgggcattgttcaagcagaagaagctgcaagcatgtcagtggaggagcggaaagccaagttcacctttctctatgtgggggaccagcttcatctcaaccctcaagtagccaaggaggctggcattgctgcagagtctttgggagaaatggcagaatcctcaggagtcagtgaagaagctgctgaaaaccccaagtctgtgagagaagagtgcattcccatgaagagaaggcggagggccaaactgtgtagctctgcagagaccctggagagtcaccccgacatagggaagagtactcctcaaaagacggcagaggctgaccccagaagaggagtagggtctcctcctgggaggaagaagaccacagtctccatgccacgaagcaggaagggagatgcagcatcccagtttttggtcttctgtcaaaaacacagggatgaggtggtagctgagcacccagatgcttcaggtgaggagattgaagagctgctcaggtcacagtggagtctgctgagtgagaagcagagagcacgctacaacaccaagtttgccctggtggcccctgtccaggctgaagaagactctggtaatgtaaatgggaaaaaaagaaaccacacaaagaggatacaggaccctacagaagatgctgaagctgaggacacacccaggaaaagactcaggacggacaagcacagtcttcggaagagagacacaatcactgacaaaacggccagaacaagctcttacaaggccatggaggcagcctcctcgctcaagagccaggcagcaacgaaaaatctgtctgatgcatgtaaaccactgaagaagcgaaatcgggcttccacggcagcatcttcagctcttgggtttagcaaaagttcatctccttctgcatccttaactgagaatgaggtctcggacagcccgggagacgagccctcggagtccccatacgaaagtgcagacgaaacacaaactgaagtatctgtctcatccaaaaagtctgagcgaggagtgactgccaaaaaggagtatgtgtgccagctgtgtgagaagccgggcagcctcctgctctgtgaaggaccctgctgcggagctttccacctcgcctgccttgggctttcccggaggccagaagggaggttcacctgcagcgagtgtgcctcagggattcactcatgtttcgtgtgtaaagagagcaagacagatgttaagcgctgtgtggtaactcagtgtggaaaattttaccatgaggcttgtgtgaaaaaataccctctgactgtatttgagagccgaggtttccgctgccccctccacagctgtgtgagctgccatgcttccaacccttcaaacccaaggccgtcaaaaggtaaaatgatgcggtgtgtccgctgccccgttgcctatcacagcggggatgcttgtctggcagcaggatgctcagtgatcgcctccaacagcatcatctgcactgcccacttcactgctcggaaggggaagcgacaccacgcccacgtcaacgtgagctggtgcttcgtgtgctccaaaggggggagccttctgtgctgtgagtcctgcccagcggccttccaccctgactgcctgaacatcgagatgcctgacggcagctggttctgcaatgactgcagggctgggaagaagctgcacttccaggatatcatttgggtgaaacttgggaactacagatggtggccggcagaagtttgccatcccaaaaatgttcccccaaatattcagaaaatgaagcacgagattggagaattccctgtgtttttctttgggtctaaagattattactggacgcatcaggcgcgagtgttcccgtacatggagggggaccggggcagccgctaccagggggtcagagggatcggaagagtcttcaaaaacgcactgcaagaagctgaagctcgttttcgtgaaattaagcttcagagggaagcccgagaaacacaggagagcgagcgcaagcccccaccatacaagcacatcaaggtgaataagccttacgggaaagtccagatctacacagcggatatttcagaaatccctaagtgcaactgcaagcccacagatgagaatccttgtggctttgattcggagtgtctgaacaggatgctgatgtttgagtgccacccgcaggtgtgtcccgcgggcgagttctgccagaaccagtgcttcaccaagcgccagtacccagagaccaagatcatcaagacagatggcaaagggtggggcctggtcgccaagagggacatcagaaagggagaatttgttaacgagtacgttggggagctgatcgacgaggaggagtgcatggcgagaatcaagcacgcacacgagaacgacatcacccacttctacatgctcactatagacaaggaccgtataatagacgctggccccaaaggaaactactctcgatttatgaatcacagctgccagcccaactgtgagaccctcaagtggacagtgaatggggacactcgtgtgggcctgtttgccgtctgtgacattcctgcagggacggagctgacttttaactacaacctcgattgtctgggcaatgaaaaaacggtctgccggtgtggagcctccaattgcagtggattcctcggggatagaccaaagacctcgacgaccctttcatcagaggaaaagggcaaaaagaccaagaagaaaacgaggcggcgcagagcaaaaggggaagggaagaggcagtcagaggacgagtgcttccgctgcggtgatggcgggcagctggtgctgtgtgaccgcaagttctgcaccaaggcctaccacctgtcctgcctgggccttggcaagcggcccttcgggaagtgggaatgtccttggcatcattgtgacgtgtgtggcaaaccttcgacttcattttgccacctctgccccaattcgttctgtaaggagcaccaggacgggacagccttcagctgcaccccggacgggcggtcctactgctgtgagcatgacttaggggcggcatcggtcagaagcaccaagactgagaagccccccccagagccagggaagccgaaggggaagaggcggcggcggaggggctggcggagagtcacagagggcaaatagcgccaggcggccgcttggccggatccaggggcggtgcagggcggccggccctgcctgcgggagagggcgagcatgaactggcccggaggacccagctcgagccgccaggacacagacgtacaggcctcctcgggagggagcgcctccccaccactgagccatcctcagcagcgtccgctgcgtctgcactgatgaccgtctgagcccagctcagcgttcctggacaaacagcctcactcctcagcgttaccgccacacttgaatttctccgaatgtcaaggttccctcccactctatttttttaggttaaagttaattggcatatggaatgttttaatctcctctgaaatgtgtagcgtaggcttttcccaagggtcgctagaaactcgtcttcgcgttgccccctttctggctctcagcgccgtcgccactcgggagaggctgggtgaggcccgtgtgaggactgaccctggattcctcgaaactgccattgtgatcattactctgctctttggaaatggctgtatcatttttttgtactaatgtgaattgttcctcagaaacgcttcttttccatcctagtgagaagctggccctgcaggtggtggcagcaatggtgttgtaagatttcctcccgtagttttttctcctcatggatttgaatgaaatgccaataacacgtccactttcaacgtgtagtttacgcggagcactttcgaggcctggccgggttgggcctacttctcacctgggcctatcttctgaactcgctaggttcttatcaacatttgggggataactttgtatatttttttcatttggcttttctttaccagtttctgatttttattctcaatatatttttgctaaacctatttcacaaatcaccaccgactgaagtgtgtgtttactgatgcggccctgagctccatggcgaaaggagtgactttgcagggcgtgagaccgcagtctgcttagagcacaggaagtgacaacttagggagccccgtagggcgctgcaggccccggggaccccagcacgtgggtctaaagagagacggagtctagctctcctgccacccagagtggcttccatctcagcactctgtgggtctggtgatggaagatgcagtctctgctgatcacatgtgccctctgccagggcacctactgagaggtgcggtcctgggggtggaggcctgcctggcaggtgtgcgtgcctcgtacgtgtgttatgggcactggtctaggccaggtatgacacccactctcctgtgagatttcactttagtttttaaaaggtccagttctacagagtgagacctatctatctgagtactacatatgttttaagacttggttctttttttgagggatccttgaccctgggaagtctggagcaccctgagaagggggcaccatgtgtgcctttgcccacgtgtcctgaggggctgcttgtctgggagggagggagagaacattcagcagcaggtgcttttttatggccttttcttaaaataacctaagggggacacatccatcttgcagagaagtttacagaactccccttgaaaactgctgctgaggctcctgttaaattttctgtggcatcttttatgccttggtaaaaactgcagtgtctttggacctgagagtggctactccgtggttttgtgacctgtaagcgtggggttcaggggtgtgtggccctgcagggtcccacgcctccctgagcactgactggaagtttcactggctggtggctgtcccttctcccatcagggtccccagcaaagttaactacacagaggacccaggggaaacgagctgtgtagccactgacttgctcgcgcggccgtggcctctgaggggcactcgccggttaagacagggtgggagtagtgctttccagttcagactctaacttctcccaaagtgtcctaagaaaatactggatcggctcatagatttatgctccttatgatgccctaacttggaaggttgttctagggacaggccgggcagtgtccccacacacaccttagagtcgaaggccccagggccccgctgtcacttgcccaaaagatcccttccggcaggtaagggactaccaatgcttacgtcaaaacagcagaatcggctttgcagtgcactttggggagcagatattaacttatttttgtgttggacagtagtgaaatcttgtgatttttaatcgctttgataatacttccaaattttatgatttttctgaaggaaataatgcaaacattttaaatatgtttctccccctttccaaaaactgttaaactaatgagcaagtaacactaactttgaatgtctctacaatacccgttgataactcagtggagccaggctttggggtagcggccctgagcttgcagggtttctcgccactggggctgaccacgcccccagctgtgaccgtgggtgtggctggctctcggccctgcccagctttgttctgaggacgtggtgacttcctgaacatcagcttcaatcctccatcattaatgtgaagcaaaacacaaaaaccgccccaatccctcaggattccttggcatccgaaaccagcatctgcacctaaacccatacccacccgtgtgcgcccacagggggatgtgtccgaatgggcagcttaaaatgtggtcacctgtgggggaaactcttcaggcacctgaagtgagaacccagctgtccgtcctcaggccggcctttcttccggcgacacccgtccatggctggctgggtccccttcgcagtgtttgtctgtcttgacatctaaaccccggcgtgtgcagtgcccatcttccaggactaccttattttccagaattaaacctgttttataattcaagttaatgcaaatgactgtcagttgccaaatatcttgatcctgtgagtgtagttgatgactgtttgttagtcagtagagtaaaatgctgtgtccacggggtgtcacagcctcaccataccctgttgaggtgtgaaatgccccgtcagaaattaaatacaaacttaaatgtgcctattggtgtctaaacttcatacaatgtaaggtcagattccttttaggaatactgggtgctgtcaccaggtttgatagttagacttaaaaacttgaaattcactttttggggggagggatatactgaaatagagagttgagacttgccagttgggggaaaatagcatttaaaatggaaagctgtgtttggaaaattgtgtatgagtatttttgtattaaaaacattttaaaggcttttttct

SEQ ID NO: 22901 - DNA, 7418 bp, Homo Sapiens; identical to SEQ ID NO: 22900

SEQ ID NO: 22902 - DNA, 8389 bp, Homo Sapiens
tgttctaagaacggaagcatctgggctggatggaatttagcatcaagcagagtcccctttctgttcagagtgttgtaaagtgcataaagatgaagcaggcaccagaaatcctcggcagtgccaacgggaagactccgagctgcgaggtgaaccgcgagtgttctgtgttcctcagcaaagcccagctctccagtagcctgcaggagggggtcatgcagaagtttaacggccacgacgccctgccctttattccagccgacaagctgaaagatcttacttcccgggtgtttaatggagaacccggcgcacacgatgccaaactgcgttttgagtcccaggaaatgaaagggattgggacaccccctaacactacccctatcaaaaatggctctccagaaattaagctgaaaatcaccaaaacatacatgaatgggaagcctctctttgaatcttccatttgtggtgacagtgctgctgatgtgtctcagtcagaagaaaatggacaaaaaccagaaaacaaggcgagaaggaacaggaagaggagcataaaatatgactccttgctggagcagggccttgtcgaagcagctcttgtgtctaagatctcaagtccttcagataaaaagattccagctaagaaagagtcttgtccaaacactggaagagacaaagaccacctgttgaaatacaacgttggtgatttggtgtggtccaaagtgtcgggttacccttggtggccttgcatggtttctgcagatccactccttcacagctataccaaacttaaaggtcagaaaaagagtgcacgccagtatcacgtacagttctttggtgacgccccagaaagagcttggatatttgagaagagcctcgtagcttttgaaggagaaggacagtttgaaaaattatgccaggaaagtgccaagcaggcacccacgaaagctgagaaaattaagctattgaaaccaatttcagggaaattgagggcccagtgggaaatgggcattgttcaagcagaagaagctgcaagcatgtcagtggaggagcggaaagccaagttcacctttctctatgtgggggaccagcttcatctcaaccctcaagtagccaaggaggctggcattgctgcagagtctttgggagaaatggcagaatcctcaggagtcagtgaagaagctgctgaaaaccccaagtctgtgagagaagagtgcattcccatgaagagaaggcggagggccaaactgtgtagctctgcagagaccctggagagtcaccccgacatagggaagagtactcctcaaaagacggcagaggctgaccccagaagaggagtagggtctcctcctgggaggaagaagaccacagtctccatgccacgaagcaggaagggagatgcagcatcccagtttttggtcttctgtcaaaaacacagggatgaggtggtagctgagcacccagatgcttcaggtgaggagattgaagagctgctcaggtcacagtggagtctgctgagtgagaagcagagagcacgctacaacaccaagtttgccctggtggcccctgtccaggctgaagaagactctggtaatgtaaatgggaaaaaaagaaaccacacaaagaggatacaggaccctacagaagatgctgaagctgaggacacacccaggaaaagactcaggacggacaagcacagtcttcggaagagagacacaatcactgacaaaacggccagaacaagctcttacaaggccatggaggcagcctcctcgctcaagagccaggcagcaacgaaaaatctgtctgatgcatgtaaaccactgaagaagcgaaatcgggcttccacggcagcatcttcagctcttgggtttagcaaaagttcatctccttctgcatccttaactgagaatgagcttttgtgggagcccacaccagtcaagttggatttgaacccagctgctctgtactgcacttagaatgatgtaatattccaggatgctgctgcaggtggcgtatcatcgtacacactcagtgacatttctatcacaatcattttatggaagatgtgtgataatctgtttttactggtattaataaacacatacaatgaagaaaacagataacaaattttaagaccaaggtaagataactaatcaaggccatttaatccgtcacattcatctcataatagaaacacgttcatattccagtggtcaatgtagatttcaagttgaaaggcagtccctttagttgggggctgtccagagctgcagcagggctttgcacggaaggggtggccctgttagagttgcttctcctctagtttgtaacttactggacttttgtggaaaatatcagcgtcgctaccctcagaaacaaactaacagcacacgttaggaggagtcctcatcagctgttctcattgccagtgagatatattcagtattgtagatactacactaatttccaacataagaggcaggaagagttttgattctatccttttttactaaacagttttattatgacactagatacagtaaatttttagaaaaaaataccatttacagtattattgtgaaccatttaacccttttgatccaaggccccggaccaaggggatactgtaatcaggttatgtacaccaacctctgcatcagttgcttctatagagcatcagccctcatgtttcattgtcttaatgtcggggagcagcctggtgtcctgccccaggtgtccgcatttttgcatggtaaggaaaaggcttacttgcccttcagctcataaaagcagaaggtgtgctattcacagtaccatgcgagtagcccacagttaattcccggcagattctttggctgtgttttatctttaatgaacgtttctgactaatattttgttgtaaaccattaagtaatgtaacgcatgtaagatgcttagggtgcctggccaggactccgtggtttcctgttgtgacagtaataatggttataataataaaaatgataaaattgccatcattctatttttatccaaaagtataaattttgctttggcatgaaaagtggtcctcttgactgcattatgcatgcgaggatgaaataaacctagaagtggcagaacactggatttgtgtgtgtggcgctttagggtgctggactgtatggctgagggctggttgggttcctctattggctctgctcaaatgttgcaggatacatagccccaaagatggtctaggagcaatctaagctgtgttactccaaaggacatgaaaaagctcaagagtaaaattaaaattctcaaaaaaaaaccccacgaaatttaaagatggggaaaaaaagatggtataaaaatggctctggttcaataagcagtcacccaaagtaaagactctatcttgaaaggcttttggtgaaaatgaagggatttcatttgaaattacagcatgatgaattttgcatgggtggccagccagctagcccataactgatagatgcattagaagtcagccagcgcataggtgctccctctatattatggagaaagcaaaaccctgcaaatgaccaaatggtgtccaaagagcagcatgacattggcatcagctgaataaccaggggcacatgggggaacgtggatgggaatgatagtgtatctcagcggggggtggggtgacatcgttccctggggacattgggaaggtgggcaggggcaagtgaactcagcactctgcagtgagagggacagtcccatgtgtggcagcattgtcccacttcagatgccaggagtgggctcatcctagaggagcggagttttccgagaggaccatctcctggtttcctgaaggaggtgggtggaaacggctcttgtttgaaagaacttagggaggaccattggcttgccaagagtacagaaattcattatgctgctaatttaacgtggaattccttcatttcataagaacctcaaaataatggtgatacattctagccttaagacatttgaattgccggttgttgaggtgaattttgtttgtcatacatggaaccattttagtcccatttgactcacttcagaccatcttccacacactatgtctgtgcttggagaggggaggtggctctccagtgtaaaacttgaggcattcactagaggtgaaaacttgtcagaatatataaaagcttagattgtagctgttctaaaaacgtaagtactccattgtaatagggtggcatcttcaggtagtgcacatattggcaatagaggtcctgaattgtttttctaagactgatctgagagccattgggccatcaagcctttatatatctgcttctaaaattgccccacctgctctagatggatctttgggcctttcctcagtgttcatgcaaaaattaaatgtcttttttcagcatactgactccaggtgtagttacatctcagtgctgtcttgagtatatattttatctcttatacctgtatctcccaactagaaacagctccagtgtttttaagagaatgtttcttaaaaccaataggaaacttaagcgaggtttcatgacacaacctttcatgtcgtgaaaggcagagggtgactgtgtgtgatgtgcagagtccttggacaggagtcgggggctcctctgtcccactgctgcttcttgagtgggtggagtggtgcttagaggatctccgagaggtccccgcagctctagggagatctgattttgtgttttttgtttaagtacttcacacagaagcctaggtagatttaaaatggggtgctcagggactggggaacaagacggggtggggtggggagatgggcatttggagagtctcatgtagctggagacgttaagagctgagcacaccacaggaaaggagggaggatgctgtgtgagagccatgctgtcaggagcaagcttgctgctcctgtgctgccctggccctggccttgcttgcccatggtgtgtgtgtccagaggtgtgtgtgaggctgccagaacaagtgctgggtctgtcacagagaagtttaaaaaagaaaactaagattataaattagcatctagttccaaaaccaaaaaaagtgcctgtggatgtatataaaattaagatgataagaaagtgctcctgagaaggctcttgccagaagcctgatgtgagtgtgtggcacctgtgatggcagggctgtgagctgggcttctgtcctcctctgtgtcccggcatggaagccagtataagcatttccaaatgagggaaaagtccttggctcgtttgatccagttgagttgaaagggttgccttggcagcagaggctcctctgatggctgacatcagtcactgcgtctgggcctgagacgtgcatggagggctgtaaagccacggattcccctcgctggagaggctcctgtctgatagcggtagatgaaaaataaggtcgttatgactttggcaacttgcttcatttctttttcatttgacttacaacacacttctctaacatctagcccttttaaatttttaattaatttcaaagcttcctctggccaggtagacttttgtatacagaccaggtgagagcccttttgccttagtgtgaaaatgtaacattttatgcttttaaaatcaatagattcatcaccttagttttttaaaaaaaatctataaatagggtaattgctgaggtgtgcggtttatctttgagatgataaagctaaattatagtcttttgccagagaaactgaggtaactgtcattagaaaaggtttcttaaaatactcacaaagctgttattggcttcttaacttctaaaatttggggggtcttgcatttatttattatttatttatttatttatttagagacagagtctcaccctgttggccaggctggagtgcagtaagtggcacaatctcggctcactgcaacctccgcctccttggttccagcaattcttctgcctcagcctcccgagtagctgggactacaagcggctgccaccacacctggctatttttttttgtatttttagtagagacagggtttcgccatattggccaggctggtcttgaactcctgacctcgtgatccacccgcctcaccctcccaaaatgctgggattacaggcgtaagccactgcacctggcggggtcttgcttattttaaaagaaatattctgattcatattttaggactttttgtcaacgaaattggttttgatccctttgggtaccatttttattgttttatgtagaatgttagaaattaccactaatttacctggcagtgatgtcaaattgactgtaattagcaggtagaaaattatttgtattatattcatctgattcctatactggatgagcaaggagcatgcttcctttgggacattcttacagcagggtgtctctccaacagcccgacagcctcatctttttggttggatacctttgaactccatggttacgtgttaggtccacatttgtgtttttttctagcctacctatagttgttggcctttttgcatataactctcgggtaatattttgaagcatgctgaccatccaggcatatagtattttcaagaaatgactgaggtaggggtgggggtcctggtccggctgatgggggtttgctcagcactgtgccagtggaagcaggtgtattgtgggcagttttgtcattgtcctcaagtccttcgcagacagtgcacagcctgctgtctgcagtcggccagaccaggctcctccccagcacactccctgtgggatggccgctgctcaggacacagtgggacaaagttgggttgataggatattttagattcattttacctttgacaagggcaggccttgaattgggagcagcagccacctggcctcactctggccacaggtgacacttggtccttgctgccacctgcttggggctatgtggctacggctacacaaaagcctgtgcaggttagaagacgactgtggtgtgcagtggtgctctgggagtggagacttcctctgttctcagagactcacccccagccctgaccctagaatttagggatagccaggaagtttctagtttgtgtaacctagaagggtcactttaataaaaattgttatgaactatagtattttagatgatgagtgacttattttaattccactttaacattttactgtgctgttaacttggaagacctgtttgaaattagtcttgatttcacactcatttaatctgctgagcacagggctgttgtcatttgtaaacgcaaacactgtggaggtacttctcgccatcagcttccttctttacaaaaccatcatttcaacatgaaaattatgtcagtttatagaaatatttattgttcaaggtctgtaattgtatttcaaaaacgatgtcgtattcaagttgtgaagggatttgttttgtcaaaaaattaaaaactcaatgtgtatgacgccactctgaagagtaggtgagcgctttgcagtcacagaaggtggcatctgactgcggctcatacaggtcaccctgaagggccacgtgcttttagcagttggctggaatgtgttcactaggttccgttatgtttggtaatatcatcttgaaaagtccctgtaatagatcaaggagactgcattccctgccctgaaggaatgtatttctaaggcaaataggcaacttggtactatcttattctgagtagagagtggagaaagtattttcagactgaagaaaactttgaaaagtcaggagctaagctgctcggagctcagtgccgcagcatggctgtggtggacgcgggaaacaacgggaaagttcttgacagagtctgtgtccgctcagtccctgcacttttcctttccaaatgcatctcgttggatatggaatagatcgtagatgttgtagactgagatttgggactatgttgggaccgtacaggtgaatgtgccacctccacaaatggcttctccgagtgagtcacgtcacctggtgcgtggaggtggagcctgcggctggagtaaggcttgctgtgggacgccctcgtactttgctctccttgcgggtggttgccgagccgagagcattggatcctccccgactgtggctagttgtctgtccggtggctgggagggggtgtggtgggaaaaagtcggaatctctgcaatctgtgtcatggactgtactattgtaaggtctatattctgtatgtgggtcccagaccctgatcaggaaatgagcctcatgtgtgtcgttaacatttatatatttccattcaaaatatgtattcagtgtttatttcctcaaaacagactttgttaatgtaggaaatctctccaagtggaaacgtgctaactttttctgtaaatctgaaataaaaggtgctgttccttcctctg

SEQ ID NO: 22903 - DNA, 1498 bp, Homo Sapiens
tcttctctgtcccaaaaccatccagacaacagaaacgagactttcagctcagtcatttccctgttgaatgaggatcccctgtcccaggacttgcctgtgaagatggcttcaatcttcaagaactttgtcattacctataaccggacatatgagtcaaaggaagaagcccggtggcgcctgtccgtctttgtcaataacatggtgcgagcacagaagatccaggccctggaccgtggcacagctcagtatggagtcaccaagttcagtgatctcacagaggaggagttccgcactatctacctgaatactctcctgagaaaagagcctggcaacaagatgaagcaagccaagtctgtgggtgacctcgccccacctgaatgggactggaggagtaagggggctgtcacaaaagtcaaagaccagggcatgtgtggctcctgctgggccttctcagtcacaggcaatgtggagggccagtggtttctcaaccaggggaccctgctctccctctctgaacaggagctcttggactgtgacaagatggacaaggcctgcatgggcggcttgccctccaatgcctactcggccataaagaatttgggagggctggagacagaggatgactacagctaccagggtcacatgcagtcctgcaacttctcagcagagaaggccaaggtctacatcaatgactccgtggagctgagccagaacgagcagaagctggcagcctggctggccaagagaggcccaatctccgtggccatcaatgcctttggcatgcagttttaccgccacgggatctcccgccctctccggcccctctgcagcccttggctcattgaccatgcggtgttgcttgtgggctacggcaaccgctctgacgttcccttttgggccatcaagaacagctggggcactgactggggtgagaagggttactactacttgcatcgcgggtccggggcctgtggcgtgaacaccatggccagctcggcggtggtggactgaagaggggcccccagctcgggacctggtgctgatcagagtggctgctgccccagcctgacatgtgtccaggcccctccccgggaggtacagctggcagagggaaaggcactgggtacctcagggtgagcagagggcactgggctggggcacagcccctgcttccctgcaccccattcccaccctgaagttctgcacctgcacctttgttgaattgtggtagcttaggaggatgtcggggtgaagggtggtatcttggcagttgaagctggggcaagaactctgggcttgggtaatgagcaggaagaaaattttctgatcttaagcccagctctgttctgcccccgctttcctctgtttgatactataaattttctggttcccttggatttagggatagtgtccctctccatgtccaggaaacttgtaaccacccttttctaacagcaataaagaggtgtccttgtcagaaaaaaaaaaaaaaaaaaaa

SEQ ID NO: 22904 - DNA, 2838 bp, Homo Sapiens
  misc_feature (2744)..(2744): n is a, c, g, or t
  misc_feature (2832)..(2832): n is a, c, g, or t
atatgttttaaaagaattacagactactcttgtccgtggataccaggtccatgtgctgactttcaccgttcacatgctgctgcaaggcctcaccaataagctgcaggtcggagatttggactcttgtttagatataatgattgagatttttaaccatgagttgtttggtgctgttgctgaagagaaggaagtaaagcagatcctctccaaagtcatggaagcacgaagaagcaaaagttacgactcttatgaaatcctcggcaagtttgtaggaaaagatcaggttacaaaactcatccttccattaaaagagatcttacaaaataccacgagtttgaaactggcccggaaagttcatgaaactttacgccgaatcacagtgggattaattgtaaatcaggaaatgacagctgaatccattctattactcagttatggtttgatcagtgaaaatcttcccctgttaacagagaaagaaaaaaatccagtagccccagcaccagatccacgtctaccaccccagagctgccttctgcttcccccaactccagttcgaggtggacagaaagctgttgtgagcaggaaaaccaacatgcacatatttattgagtccgggcttcggctgctgcatctgagtctgaagacttccaagatcaagtcttcaggtgaatgtgtcctggaaatgctggatccttttgtgtctctcctcatagactgcctgggctccatggatgtgaaggtgatcacaggtgctttacagtgcctcatctgggtcttgaggttcccgctaccttccatagaaacaaaagcagagcagctgacaaaacacctcttccttctgctgaaggactatgcaaagctcggggccgccaggggccagaacttccaccttgtggtcaattgtttcaagtgtgtgaccatacttgtcaagaaagtcaagtcttaccagataactgaaaaacagctccaagttctactggcctatgctgaggaggacatttatgatacttcaagacaagccactgcctttggtcttctgaaggcaattttatcaagaaagctgttggtcccagaaatcgatgaggtcatgcggaaagtatccaagttggcagtctctgcacaaagcgaacctgccagggtccagtgtagacaggtttttctgaaatatattcttgactatcccctgggtgacaaattgagaccaaacttggaattcatgctcgctcaactgaattacgaacatgagaccgggagagagtccaccttggaaatgatcgcctatctctttgacacgttccctcaggggctgctccatgagaactgcggaatgttctttatccctctttgtctaatgacgatcaatgatgactctgccacgtgcaaaaagatggcatccatgacaatcaagtccctacttggtaaaatcagcctcgagaaaaaagattggctgtttgatatggttaccacttggtttggagcaaaaaagcgcttaaatagacaacttgctgccctgatctgtggcttgtttgtggaaagtgaaggagttgattttgagaaaagacttggaactgtccttcctgtgattgaaaaggaaattgatcctgaaaactttaaagatatcatggaagaaactgaagaaaaagctgcagatcgccttctgtttagttttcttacactgataactaaacttatcaaggaatgtaatattattcagtttaccaaacccgctgagactttgagtaaaatctggagtcatgtgcattctcacctgagacatccacacaactgggtgtggctcacagcagcccagatttttggattactctttgcctcttgccagccagaggagcttattcaaaaatggaataccaaaaagaccaaaaaacacctcccagaacctgtagcaatcaagttcctagccagtgaccttgaccaaaagatgaaaagtatctctctcgcctcttgccatcaattgcattccaaattcttggatcagtctctaggagaacaggttgttaagaatttgttgttcgcagccaaagtcttgtatttactggaactttattgtgaggataagcaaagtaagataaaagaagacctggaagaacaagaagctttagaagatggtgtggcctgtgcagatgagaaggcggagtctgacggagaagagaaggaagaggtgaaggaagagctcggcaggccggccacgctgctgtggttgatccagaagctgtcccggattgcaaaactggaagctgcttattcgccgagaaaccccttaaagagaacatgcatctttaagttcctcggcgccgtagcaatggatcttgggatagacaaggtaaagccgtatctcccaatgatcatagctcctttgtttcgggaactcaacagcacctattcagagcaagatcctttgctgaagaatctatcccaggaaatcatagaattactcaaaaagctggttgggcttgagagcttctcattagcctttgcctctgtacagaaacaggctaatgagaaaagggcactccggaaaaagaggaaggccctggagtttgtaactaatcctgatattgctgccaagaaaaaaatgaagaaacacaaaaataaaagtgaagcaaagaagagaaagatagagttcctgcgtccaggatataaggccaagagacaaaaaagccatagcctgaaagatttagcaatggtggagtaatgtctccctgtgctgatacaagcatgaactntctggaatattctgctagtctgaaattacagcaggttgtctggggtaggggggaggcgtttttttttttttttgagacaaggtctcantctgtc

SEQ ID NO: 22905 - DNA, 1555 bp, Homo Sapiens
tggcgggtctcggaaggttccgacctcagtaaagagagctaacgtgtattcttctttttcttagatgctgagatgaatcgtcacctgtgtgtttggctttttagacatccatctcttaatggttacctccagtgtcacatccagctccattctcatcaatttagacagatacatcttgacacaaggctgcaagtttttagacaaaacaggaattgcattcttcatctgttaagtaagaattggtccaggagatattgccttcaagacaccaagatgctctggaatcataaagcactacagaaatatatggagaacctgagtaaggagtaccaaacacttgagcaatgtctgcagcatatccctgtgaatgaggaaagccgaaggtccttgaacagaaggcatgctgagttggcacctcttgcagccatttaccaagaaactcaggagactgaacaagcaattgaagaattaggatcaatgtgtaaaagcctaaataaacgagatgaaaagcagttactagaacttgcactggaagaaaggcaaaccattgatcaaaaaatcaacatgttgtacaatgagcttttccagagccttgtgccaaaggagaaatatgacaaaaatgatgttattttagaggtgacagctggaaggactactggaggtgacatctgccaacaatttacccgagaaatatttgacatgtaccagaattattcgtgctataaacactggcaatttgaacctctgaattatacaccagcagattatggtggactacatcatgcagccgcccgaatttccggtgacggtgtctataagcacttgaagtatgagggtgggattcaccgagttcagcgcatccccgaggtgggcctgtcctcaaggatgcagcgcattcacacaggaacgatgtcggttattgtccttcctcagccagatgaggtggatgtgaaattggaccccaaggatttgcgaatagatacatttcgagccaaaggagcaggagggcagcatgttaataaaactgatagtgccgtcagacttgtccacatccccacagggctagtagtagaatgccaacaagaaagatcacagataaaaaataaagaaatagcctttcgtgtgttgagagctagactctaccagcagattattgagaaagacaagcgtcagcaacaaagtgctagaaaactgcaggtgggaacaagagcccagtcagagcgaattcggacatataatttcacccaggatagagtcagtgaccacaggatagcatatgaagttcgtgatattaaggaatttttatgtggtgggaagggcctggatcagctaattcagagactgcttcaatcagcagatgaagaagccattgctgaacttttggatgaacaccttaaatcagcaaaataaatactaacttattattatttatgattatataaatgaaatggacctatatcaagaggcagactgaagcttggaaatcattatgaatatttgtaaattacagctttaagaacacattacacataaatatatgttttgtaattaaaaa

SEQ ID NO: 22906 - DNA, 1382 bp, Homo Sapiens
tactccttttattttctgggcctctaggatttatctcctgctttctttttcaatgctgtcacctattatttctgactaaggtttttctctttataaatccactctgagatggaattcttttttccctaaatcccttttgaaatatttctaacagatgacactaaatatgggaaagcatattgggaccaaaaatataccattctttgttcttctttcttcctttaaaaagttagttgccatgtttaaaaagaaaagtggacatgtgctcttctcctttctggtcctatcccttcctccccatcatatcctactgtaaactggctctggggcagataaaaatcaaggaaagcaaggggaagtgaatttttgtagtattgggtgggctttcaagtataagggccttatatatgaaagttaagttagggtctactatgtatatgtgttcagtttttaaaattttagttaatttttttaaaaatttaggtttatgtctgggaaagaaataaagaagaagaagcatttgtttgggttgcgaattcgtgttcctcctgtgccaccaaatgtggctttcaaagcagagaaagaacctgaaggaacatctcatgaatttaaaattaaaggcagaaaggcatccaaacctatatctgattcaagggaagtaagcaatggcatagaaaaaaaaggaaagaaaaaatctgtaggtcgtccacctggcccatatacaagaaaaatgattcaaaaaactgctgagccacttttggataaggaatcaatttcagagaatcctactttggatttaccttgttctatagggagaactgagggaactgcacattcatccaatacctcagatgtggatttcacgggtgcttccagtgcaaaagaaactacctcgtctagcatttccaggcattatggattatctgactccagaaaaagaacgcgtacaggaagatcttggcctgctgcaataccacatttgcggagaagaagaggtcgtcttccaagaagagcactccagactcagaactcagaaattgtaaaagatgatgaaggcaaagaagattatcagtttgatgaactcaacacagagattctgaataacttagcagatcaggagttacaactcaatcatctaaagaactccattaccagttattttggtgctgcaggtagaatagcatgtggcgaaaaataccgagttttggcacgtcgggtgacacttgatggaaaggtgcagtatcttgtggaatgggaaggagcaactgcatcctgactgtaggactgaacattatgttcactgcactctgattttctgtaggtacagttcaaagccctaaaggagtctggcttttactatctttcttaaaaaaaaaaaaaaa

SEQ ID NO: 22907 - DNA, 6977 bp, Homo Sapiens
gatcatgaggtcaggagtttgagaccagcctggccaacatgatgaaacactgactctactaaaactacaaaaaattagccaggcgtggtggtgtgtgcctgttatctcagctacctgggaggctggagcaggacaatcacttgaacccaggaggcggaggttgcagtgaacagagatcgtgccattgcactccagcctgggcaacagagcaagactccatctcaaaaaaaaaaaaatgctcagtgcatgtgtttgtgtgcctgtgtgtatatgcccacacgtgcacacacagaggtggagtgggggtcctcatttattcaccagaggcttctttggtaaaagaagaaggctgcgtcatcagggttttcaagccttcagagttcccgagggctcccgcagacagctccccctgtatccccaatgagtggtcttctcccttccccctacaaccatagcagcactctatattttgtctacaagttgagattacctataaaattccatcctgcatttgcaaacctgaacgagaaaggctccaagtaactggtctggagctcttacgtcctgtccaggccccggttcctgggttctgtggttctgtaagaggaaatggcagctggggcgtggaggcctgggtacagctgagtagggagcactcgtgtggggctaaatgaatgcagttgaaggatctggatcatctgggaccctacatgtcttccttctttgcctcctttccagggacgcactctctgagatattttcgcctgggcgtttcggatcccatccatggggtccctgaatttatttcggttgggtacgtggactcgcaccctatcaccacatatgacagtgtcactcggcagaaggagccacgggccccatggatggcagagaacctcgcgcctgatcactgggagaggtacactcagctgctgaggggctggcagcagatgttcaaggtggaactgaagcgcctacagaggcactacaatcactcaggtgtgcatgcggcagagacagacgcttcccccatcccaccccaacccgcagagacccctgggctggcctccaataagcggatgctgaattgcacctgctgtagctttggcaaagcctgaggaatcaggttggtggagttcagggcctcccatctgcctgtgcatcttctggactgtccctctctcccccaggagcactctgtcatttgccccacccactcttccccatctctgtatccgtatctgcatcccatttccactcaggcttctgatatgcatctccttttccattctaaatttgcccattctgcgtctcacttcctggtagtcaggcctagtgacttgcttatgagtatcgacagtaactttcccaggggtatttctggctcctgcatctctctccctcctcaactgcagtcagaatagccacaaagtttatcagtcattcccattacaggataactccccaaggcgggaattagcacactcctttgacaggcagtaggtacttcacagatacctgctgacaggtgggcttccataagggggacctcctggggactcagcgatgccatggcaggcctggggggtgacataatgtagaccaaaggatgcttccagccatgcccctgctcccagcacttgagagcccacctctgtctctgtgtggacccctctgggcttctgtgtgtgttccagggtctcacacttaccagagaatgattggctgtgagctgctggaggatggaagcaccacaggatttctgcagtatgcatatgacgggcaggatttcctgatcttcaataaagacaccctctcctggctggctgtagataatgtggctcacaccatcaagcaggcatgggaggccaatcagcatgagttgctgtatcaaaagaattggctggaagaagaatgtattgcctggctaaagagattcctggagtatgggaaagacaccctacaaagaacaggtaaagagaaagagaaggcctcattcccacattgcctgaacaactgtttttatacgtaactcttttaatctaggttatatccactgtatcctgaaagccatctctttagttggcctattgtgatctcatgctagagcccccacgaaactttccctggttacttttgagccgcatcttgacaagatttgacggttccccttgtcttgcacagagtgagtacctccaagggcaccttgtttttagggatctattgaggcaaattcttccattccgtcaatgataagctgggaaattctttgggagatagagcaattcttacaaactgtttagttaacaaagggctcacacaccaccagtaggcgtaaaaatctggatttaccaagacaaacagaaggtctctgcttactaaaggattaatgaggttggcatgatgctcatgcctgtaatcctagcactttgggaggctgaggcaggaggattgcttaaggccaggagtttaagactggcctgggtaacattgtgagaccctgtctctattaaaaaaaaaattagctgagcatggtggcacatgactgtagtcccagatactcaggaggctgaggtgggaggatctcttgagcctggaaggtcaaggctgcagtgagccatgatcatgatcagcctgggtcacagagcaagaccctatttaaaaaaaaaaaaaagtattaatgataagattcctttcagcaaagagctcctcttataccttaaagatatgattcagttggtcaacttttagttcatatagaacttttcatgtatggtcttgttattcaaaattaatcacacctgtatgatgctacaggaaactcctagatacaatgtgtgtgggaagagtatgggaagctcccctctccaggcctctgtctacattcagtgtcctaatggattttcaaccttttggtcaaaacacactcctaaaaaaacaaacaaaaaaaaaaaagaaaagaaaaaacacattcctagaaaaggatcttggattaatttcttacaggccctatcaaaaagcacagtccctcctagtagcatttattttacttttaatgttggaaagcctttttctactaccaaatatcatgcctcggtaaagagacaaggaaagcattgttggagtgaaggctcttctccgtattgggttggccgatgataaggtgggggtcaggaggcaagtcagagatgagcaggaagcagtcccccccagatagtgcctttggtctcggtatggctgtttgacccaatttcagcaagaaacattaaggacaggactgtatggaaaattaagagtagtcatgaggaagcaaggtcacacgtgggtacttctttggtgtcactgctggagcccttctatgatatcagtttcttcgaaggcacaaccatggcatgatctactacatatgtttgtacctgatggcagtcatcaaaatgccagcgcaagtacacaaggcaattcggagccaaaactgagtggggatggctgtgttatttacgtgcactaaacacagaaatgagaacaaggagttctaatctccaatctattgctgacttacttattgggaacagtcacttacacattttatgggtcagttttccttgacacataaaggtatttcaaaggttactagtaaacaaccccagcacactttccaaacagtcaaagctgtatgactttccccccttagaggatggagcatgggccaactccacattcttcactacctagcaccttgccatcatggaaggtatacgtaaatacgtttgttgttgatgaacctgagttctgggtcattcttagctttagaagtttcctgcaataaagaaaaattaggaaagccagttgccaagttctaatattatatgctcagtacataaggcactttgatttaactttagcttcttcttcctagagcccccactggtcagagtaaatcgcaaagaaacttttccaggggttacagctctcttctgcaaagctcatggcttttaccccccagaaatttacatgacatggatgaaaaacggggaagaaattgtccaagaaattgattatggagacattcttcccagtggggatggaacctatcaggcgtgggcatcaattgagcttgatcctcagagcagcaacctttactcctgtcatgtggagcactgcggtgtccacatggttcttcaggtcccccagggtaaggacggggatcgtggctgtctagggagagagcctggagaaaggggtgagcaggaaaccatgctcgctgccagggaggggaggatagatcactgcctcactcagtgtgccttagaatgggtcttttaaataagtggttctcacactttttggaaccaggacgccttcatactattaaaaaattattgaggaccccagagagcttttgctgatgtgggttatatctattgctatttactacattacaaattaaaaatttaaaaattaaacacgaatgggtgcagtggctcatgcctgtaatcccagcactttgggaggctgaggcaggtggatcacttgaggtcaggagttcgagaccagcctggccaacatggtgaaaccccatctctactaaaaatacaaaaattagccaggcatggtggcgcatgcctgtaatcccagctcctggaggctgaggcaggagaatcgcttgaacctgggaggtggaggttgcagtgagccgagatcgcaccactacactccagcctgtgcgaagggagcaagactccctctcaaaaaaacaaaaaaacaaaaaacaaaaaaacacaacccaggcgcagtggctcactcctgtaatgccagtactttgggagcgtgacgcgagtgaactgcttgagcccaggagttcaagaccagcctgggcaacatactgagatctcatctctacaaaaaacacaacaattagctgggcatgatggcatgcgcctgtagtcccagctactgaggaggctaaggtgggaggatcgcttgagcccaggaggttgaggctgcagtgagctataatggcaccactgcacttccacctggacgacagagtgagacgctgtctcaaaaaaaaaaaaaaaattaaacacaagaaaacacaagcagatattccattagtggtcagattgatgagtgagaagcaacagtaaggaaaatggtgttgggtttcctgatgatcacagggacaaaagtcccagaaagttaacacagaagggaaaggggacttgtggattttttctcatttgcttgctttcagaatcagaaactatccctcttgtgatgaaagctgtctctgggtccattgtccttgtcattgtgctggctggagttggtgttctagtctggagaagaaggccccgaggtgagaggcacatggaagggatccagggggctgcagactctcctgcatctctccagttttattttctgcacctgctgctccctcctccattcagaaatggcttggctctcaggctgggatcacagaaggacctgggacaaccctcccaccatgtaggggacacaaagcatggataaagcttacagggagagtggtctccttttcataggtgatgcctgacatcaacaaactagtacatctgtccaggggaactgtccccctagaagttgggtcagagaagatatggggatcttgatttgtctttttccaaaccatctttttattattaattactattgacttctggggcagtgtcctttgtttcaagacttcagtcagttttcccattttgaccaccattctttcatcccaagcatatgaaagtccttttccttgtaaattcattattcaaaacattaaatatgtaagagtagataccttcagggaatgggacttagagtaaggaaaaggggaggagaagtaggagatatataggctcttgataatgtggaataacataaattcattcagtaagtatacattaatgacctactgtgctccaggcactgtactggttgctgggatataacaatgaacaagacagatacgatccctgttttcatagagcttacaatagagcctggtaaggttatctcctggctctggcttcactaattgctcaaattgatcacaggatagtaccgatgagaccatgctttgaacccaaagtggaccagaagtctggttttccttcatagacatagacctcaactccaattcaggtgataactgtacaaaagcatgttgttagatcaaagtaaaaccaacccttttactagaaaatcagctcagaggccgggcgtggtggcttacaacttgtaatcccagcactttgagaggccgaggcaggcggatcacttgaggtcaggagttcgagatcagcctggccaacatggtgaaaccctgcctctactgaaaatattaaaaaaaaaaaattagctgggcgtggtggcacatgcctgtaatctcagctactcaggaggctgagacaggagaatcgcttgaacctgggaggcggaggttgccgtgagcaaagatcgctccattgcactccagcctgggcagcaagagcgagactctgtctcaaaaaagaaaaaagaaaagaaaagaaaagaaaatcagctcagagagttaatgggttgttaatgttttctttatagataaagtacagcactaatcctaatccaataaatgatagtgaaacaaacaaaaaatttttttacaatgacatccctctctcaataattatacagactgtgagttcctgctttttatcttatagagtttacaaatttgagctaaagtttgtcaagtactaagagaatcttgacaaagcaagctaaaactgtcgatgcctgtttctcagattttgctgaaaactgcatactttatttttgagctgtgaggaaacattcttgtaatctgactaaaaacccctttccttttagagcaaaatggagccatctaccttccaacaccagatcgatgattgcagatccctcttttccagttctccttc

SEQ ID NO: 22908 - DNA, 3152 bp, Homo Sapiens
ggcgcgggcggtgaggacggacagtcaccgacttagtccagttccctgtgatctcaaaacaattgttgcagcaggctcctggcagtctcaagcagttcatcttcttggtgtactggtttcctattgtgattttatcatggaaaatcaactggctaaatcaactgaagaacgaacatttcagtaccaggattctcttccatcactgcctgttccttcacttgaagaatcattaaaaaaataccttgaatcagtgaaaccatttgcaaatcaagaagaatataagaaaactgaagaaatagttcaaaaatttcaaagtgggattggagaaaaattgcaccagaaattgcttgaaagagcaaaaggaaaaagaaattggctggaagagtggtggctgaatgttgcctatctggatgttcgtataccatcacaattgaatgtcaactttgcgggtcctgcagctcattttgaacactactggcctccaaaggaagggactcaattagaaagaggaagtataactctttggcataacttgaactactggcagctattaagaaaagaaaaagtgcctgttcataaagttggaaatactcctctagatatgaatcaattccgaatgctattttctacctgcaagggtccaggaattactagagactccattatgaattattttaggactgagagtgaagggcgttccccaaaccacattgtagtgctgtgtcgaggccgagcttttgtctttgatgtaatacatgaaggatgtttggtcaccccgccagagcttctcagacaactgacatatatccacaagaagtgccatagtgaacctgatggacctgggattgcagcattaactagtgaggagcgaactcgatgggctaaggcacgagaatatctgattggtcttgatccagagaacttggctttgttagaaaaaattcagagtagtttactggtatattccatggaggatagcagtccacatgtaacaccagaggattattctgagattattgcagccatccttattggagatccaacagtacgctggggtgacaaatcctataacttgatttccttttctaatggagtatttggctgtaattgtgatcatgctccttttgatgcaatgattatggtgaacatcagttattatgtggatgagaaaatttttcagaatgaaggaagatggaagggttcagagaaggtacgagatataccacttccagaagagctcattttcattgtggatgagaaagttttaaatgacatcaaccaagctaaagcccagtatctcagggaggcatctgatctacagattgcggcttatgcctttacatcttttggcaaaaagctaaccaagaacaagatgcttcacccggatacgtttattcagcttgcacttcagctggcctattacagacttcatggacaccctggttgttgctatgaaacagctatgacaagacatttttatcatggccgtacagagactatgcgatcatgcacagttgaagcagtgaggtggtgccagtccatgcaggatccttctgtcaatcttcgtgagcggcagcaaaagatgttacaagcttttgcaaagcataataaaatgatgaaagattgttcagctggaaaaggatttgatcgtcaccttttaggtctcttactcatagcaaaagaggaaggtcttcctgttccagaactctttacggacccacttttttccaaaagcggaggaggtggaaattttgttctctcaacaagtctggttggctatttacgagtccagggagtggtagttcccatggtacacaatggttatggatttttctaccatatcagagatgacaggtttgttgtggcctgttcagcctggaaatcctgtcccgagactgatgcggaaaagctagttcagctgactttttgtgcttttcatgatatgatacagctgatgaactctactcatctttagagatgaatcatctattaagcacttaccaaaacatatcattaaactgagtgctgggagtgagttggtaatatgagatgggaaggaatgttgacttgctaacattcctttaacaagttaagaaaacttgttaaatgtagaaattagtagaatcatgctctctaaatttattctgccatagaaggtagaaatatttttaagctcctctgatgcagcagcaatgcaaattatgacatagtgaatatagaactatgcagtatttaagcctcaacaatccaaatctacaaactttaacaatgcaagtcttactctaatttttaagtatttttgttggtacttacatgggttataaatcctctctctggacatcaatgtagagtccatctttcaagcactttaatttttttagctgccaaagggtatgaattacattattgtatgctaatttccctgaaatcaatgccttctatgttcaccacagggatacaagcctgttatgtttgatgggaaagaccactacaatctaatggtgatctaaaataacttttttgggctgggtgcagtggctcatgcctataatcttagcactttgggaggccaaggtaggaggattgcttgaagctaggagtttgagaccagcctgggcaacagggtaaggtcctgtctctacaagatcaaaaacttagccgggtatggtggtgcatgtgtgcctgtagtccaagctacttgaaggctgagacaggaggatcggttgagcccaggaggttgtggctgcagtgagctgtgatgtgcccttatgctatagcctgggcaagagcgtgagaccctgtctcaaagaagaaaaaaagagaaaaataactcttttgaacaaacagacaaattagctagtagtatggagatgtataccctctattacacacataaaaccgtaacaaaattcattgtggtgtattataattagttttgtgaatagaaaaataaagcacttatgtttaaatttgttacagtgacttttaaaggattaatgttgaatcacattgtcagaattttttcctcctcgctgttcaattttgtagtttttactctcaaaaaatgaaattctcaaaattatatagctttttgttttgtttgaataaatgattcattcctgtttaaaaaaaaaaaaaaaaaaaaaaaaaaa

SEQ ID NO: 22909 - DNA, 4050 bp, Homo Sapiens
ggaaacgggtgaagaaggggaggcggcagggaagggggtgggggcctggcgggggcatccggcggagctggggtccccgggctccgtccggaggaagcgacgctgcgctcgctgggcagtcggaggggacgggacgcaccggagggcaggcggactcgccctgtcggtgactgcgccgtccgggcccgtcctgcctggccgcaggtgccctggatgaggccgccccgcgcgccccaaacgattttataatcaatggataaagtgggaaaaatgtggaataacttcaaatacaggtgtcagaatctcttcggtcatgagggaggaagccgtagtgaaaatgtggacatgaactccaacagatgtttgtctgtcaaagagaaaaacatcagcataggagactcaactcctcagcaacaaagcagtcccttaagagaaaatattgccttacaactgggattaagcccttcgaagaattcttcaaggagaaatcaaaattgtgccacagaaatccctcaaattgttgaaataagcatcgaaaaggataatgattcttgtgttaccccaggaacaagacttgcacgaagagattcctactctcgacatgctccatggggtgggaagaaaaaacattcctgttctacaaagacccagagttcattggatgctgataaaaagtttggtagaactcgaagtggacttcaaaggagagagaggcgctacggcgtaagttctgtacacgacatggacagtgtttccagcagaactgtaggaagtcgctctctaagacagaggttgcaggatactgtgggcttgtgttttcccatgagaacttacagcaagcagtcaaagcctctcttttccaataaaagaaaaatccatctctctgaattaatgcttgagaaatgcccttttcctgctggctcagatttagcccaaaaatggcatttgattaaacagcatacagctcctgtgagcccacattcaacattttttgatacgtttgatccatctttggtttctacagaagatgaagaagataggcttagagagagaaggcggcttagtattgaagaaggggttgatccccctcccaatgcacaaatacatacatttgaagctactgcacaggttaatccattatataaactgggaccaaaattagctcctggaatgactgaaataagtggggacagttctgcaattccacaagctaattgtgactcggaagaggatacaaccaccctgtgtttgcagtcacggaggcagaagcagcgtcagatatctggagacagccatacccatgttagcagacagggagcttggaaagtccacacacagattgattacatacactgcctcgtgcctgatttgcttcaaattacagggaatccctgttactggggagtgatggaccgttatgaagcagaagcccttctcgaagggaaacctgaaggcacgtttttgctcagggactctgcgcaagaggactacctcttctctgtgagcttccgccgctacaacagatccctgcatgcccgaattgagcagtggaatcacaactttagtttcgacgcccatgacccgtgtgtatttcactcctccactgtaacgggacttttagaacattataaagatcccagttcgtgcatgttttttgaaccattgcttactatatcactaaataggactttcccttttagcctgcagtatatctgtcgcgcggtaatctgcaggtgcactacgtatgatggaattgatgggctccctctaccctcaatgttacaggattttttaaaagagtatcattataaacaaaaagttagagttcgctggttggaacgagaaccagtcaaggcaaagtaaactctccggtccccaaagggtgttaactaggtccgctttcatgtgcatcagacagtacacctatagcaagcacacgtagcagtgttaggctttttcatacagtatgtaagcttagtgttagtatctgtcagatgctacctgctgttacttattcagataaacatggtgcctattggaacaatagcggatagagctacaggtgttcagtaagactacaaaaacattttgcctatttcgctaacagtttggtttttaatggctgtggtatttgagtgaggcaactctggggcatttgttatgaagaattctatttcttactgaagaacaaattattaatattggatgagtatttcaacagtgtgactaatgtttgaaattattttttctaagagtttttctataaccttccaaaagtcgtgatgtttgtagttactataaatcaagctttggaagtccaaaaagaataaaagactgccttccttttagaaaaaaatgcaattttctggccacaagggcatagtgcagttcacttacgtgttgatgtagtttataatcagacgccttttctcttctgcaaaaggtactgttaagtaaaccagattttctaaataggcattcttaaaatttcagacttacaaagctagtagtagaattgtattgaaaggcctaggtattaattttttaaatgagtgctttaacttaaaacaggcgtttggaatagctgctgcaatgtagtcttgtgtgtgatttttttttaagttgatgtgcagtctaattgttgtttcataaaagttggatctgttcctatgcccaggatgattttgtgaaccgtgaagtacgtgagactagaagacgcccaaacaagtcagataatagtaactacaatggttgctgatgttgagattattgttgaactataattaataatttggatggcagaatttatctcttttttgtaaactctcataactgaattgcttaagtataatttataaaatttcagtgcagttcattcttaatggaaaatctgaaacctaaattgcagatttaaaaggtactgtacaaccattatatctgtaaataacttagcacctttttgtcacttagaataatatgtactactacttgagtgagcgcttttggaagttatatcaagttctagtgtttgcttcttagtaactgaactgaatttacagttctgtcctagacattttgcactaaagtagccgaatccactctcatgtcttttcgttaatgtgctctgtaccactggtgagtgctccatagtttccttacctgctgctacagaatgttattttacatccctatggctattgccaaggctacaaaaaaggaaagctatatttgtatgcaacactaaccttttgactgctaatgtatgtttctgcttgctgtgccttgttatggctgctttttttgtgctaataaagtatgtttggtgttctccttgtatatctgctgttttatacatttgcaacaatttctcttgtaaatggaatggtttggggtttttaaataagcattaactaacaacctttctatagttaatgcagagttaatgaacagtctaatattgacttatcagaataagctaactctaaatttaatgctctacatcttatcagtcataattatatatactgtggaacagtatctgtagttactgcaaattactgtacagtttaggttataacagaaaactgacagagaagtaataaacctattgatttctctgcttataaatgaaagattgaaactatccaatgacatattatagtaaatgagtatctgtaacctcccactgcatcagaagcaggttaaatgaagtcttgtgaatttgtaatagatcagtaccatttattggtttggggaccatcttaattaaaaataaatgcccaaaatgtagaactttaaccaaagacttgtcccttttaaagcaaaatggggattgaagggacttataatttctgttgtttctaattaaagtccctgaagatcatataccaaagtgtttgagaacttcatccaaacctactttaaagcattatgtgcaattaagttgttatgacataattatattgcctaattgttgggtcttttttcttgagcttataatgtacctggaaaataaacctcttgagaaaaaaaaaaaaaaaaaaaaaaaaa

SEQ ID NO: 22910 - DNA, 1764 bp, Homo Sapiens
aaccggcagacgatgggcagcatcgaacaaacaactgagatcctgttgtgcctatcacctgttgaagttgccagtcttaaggaaggaatcaatttctttcgcaataagagcactggcaaagactacgtcttgtacaagaataagagccgactgagggcatgcaagaatatgtgcaagcaccaaggaggcctgttcataaaagatatcgaggatttagccggaagttgttgaaatggatgaaaacaacggacttttgcttttagaactgaatcctcctaacccttgggacttacagcccagatctcctgaagagttggcttttggagaagtacagataacatatctcactcatgcctgcatggacctcaagttaggagacaagagaatggtgtttgacccttggttaatcggtcctgcttttgcccgtggatggtggttgctccatgagcctccatctgattggctggagaggctgtgccaggcagacctcatttacatcagtcatctgcactcagaccacctgagttaccccacactgaaaaagcttgctgggagaagaccagatattcccatttatgttggaaacacagaaaggcctgtattttggaatctgaatcagagcggtgtccagttgactaatatcaatgtcgtgccatttggaatatggcagcaggtggacaaaaatcttcgattcatgatcttgatggacggtgttcatcctgagatggacacttgcattattgtggagtacaaaggtcataaaatactcaatatagtagactgcaccagacccaatgggggaaggctgcctatgaaggttgctctaatgatgagtgattttgctggaggagcatcaggctttccaatgactttcagtggtggaaaatttacggaggaatggaaagcccaattcattaaaacagaaaggaagaagctcctgaactacaaggctcggctggtgaagaacctgcaaccccgaatttattgtccctttgctgggtattttgtggaatctcacccatcagacaagtacatcaaggaaacaaacaccaaaaatgacccaaatgaactcaacaatcttatcaagaaaaactctgatgtgataacatggacccctcgaccgggagccacccttgatctgggaagaatgctgaaggatcgaacagacagcaagggcatcatagagcctccagaggggacaaaaatttacaaggattcctgggattttgaaccttatttggaaatcttgaatgctgctctaggagatgaaatatttcttcactcatcctggataaaagaatacttcacttgggctggatttaaagattacaaccttgtggtcaggatgattgagacagatgaggacttcaatccttttcctggaggatatgactatttggttgactttttagatttatccttcccaaaagaaagaccacaacgagaacatccctatgaggaaatccatagccgggtggatgtcatcagacacgtggtgaagaatggtctactctgggatgagttgtatataggattccaaacacggctccagcgggatcctgacatataccatcacctgttttggaatcattttcaaataaaactccccctcacaccacccaactggaagtcattcctgatgtgctgtgagcagaatgggcctgcgattttgcaattctctacagaaagaaccaatgaacccaataggaacaaattctctgtggaaaacaaagcatagctgtagtagatacgaatccaatcaca

SEQ ID NO: 22911 - DNA, 2116 bp, Homo Sapiens
accgaagccaacctgaccgggcacgaggagaaggtgagcgtggagaacttcgagctgctcaaggtgctgggcacgggagcctacggcaaggtgttcctggtgcggaaggcgggcgggcacgacgcggggaagctgtacgccatgaaggtgctgcgcaaggcggcgctggtgcagcgcgccaagacgcaagagcacacgcgcaccgagcgctcggtgctggagctggtgcgccaggcgcccttcctggtcacgctgcactacgctttccagacggatgccaagctgcacctcatcctggactatgtgagcggcggggagatgttcacccacctctaccagcgccagtacttcaaggaggctgaggtgcgcgtgtatgggggtgagatcgtgctggccctggaacacctgcacaagctcggcatcatttaccgagacctgaaactggagaatgtgctgctggactccgagggccacattgtcctcacggacttcgggctgagcaaggagttcctgacggaggagaaagagcggaccttctccttctgtggcaccatcgagtacatggcccccgaaatcatccgtagcaagacggggcatggcaaggctgtggactggtggagcctgggcatcttgctcttcgagctgctgacgggggcctcgcccttcaccctggagggcgagaggaacacgcaggctgaggtgtctcgacggatcctgaagtgctcccctcccttcccccctcggatcgggcccgtggcgcaggacctgctgcagcggctgctttgtaaggatcctaagaagcgattgggcgcggggccccagggggcacaagaagtccggaaccatcccttcttccagggcctcgattgggtggctctggctgccaggaagattccagccccattccggccccaaatccgctcagagctggatgtgggcaactttgcggaggaattcactcggctggagcctgtctactcaccccctggcagccccccacctggggacccccgaatctttcagggatactcctttgtggcaccctccattctctttgaccacaacaacgcggtgatgaccgatgggctggaagcgcctggtgctggagaccggccaggtcgggcagcggtggccaggagcgctatgatgcagcagtacgagctggacctgcgggagcctgcgctgggccagggcagcttttctgtgtgtcgccgctgccgccagcgccagagcggccaggagttcgcagtcaagatcctcagtcgcaggctggaggcgaacacgcagcgcgaagtggctgccctgcgcctgtgccagtcacaccccaacgtggtgaatctgcacgaggtgcatcacgaccagctgcacacgtacctggtcctggagctgctgcggggcggggagctgctggagcacatccgcaagaagcggcacttcagcgagtcggaagcaagccagatcctgcgcagcctcgtgtcggccgtgagcttcatgcacgaggaggcgggcgtggtgcaccgcgacctcaagccggagaacatcctgtacgccgacgacacgcccggggccccggtgaaaatcatcgacttcgggttcgcgcggttgcggccgcagagtcccggggtgcccatgcagacgccctgcttcacgctgcagtacgctgcccccgagctgctggcgcagcagggctacgacgagtcctgcgacctctggagcctgggcgtcattctgtacatgatgctgtcggggcaggtccccttccagggggcctctggccagggcgggcagagccaggcggccgagatcatgtgcaaaatccgcgaggggcgcttctcccttgacggggaggcctggcagggtgtatccgaggaagccaaggagctggtccgagggctcctgaccgtggaccccgccaagcggctgaagctcgagggactgcggggcagctcgtggctgcaggacggcagcgcgcgctcctcgcccccgctccggacgcccgacgtgctcgagtcctctgggcccgcagtgcgctcgggtctcaacgccaccttcatggcattcaaccggggcaagcgggagggcttcttcctgaagagcgtggagaatgcacccctca

SEQ ID NO: 22912 - DNA, 1807 bp, Homo Sapiens
agcgggtgctgctagcggaggcgccatattggaggggacaaaactccggcgacagcgagtgacacaaataaacccctggacccccttgttccctcagctctaagggccgcgatgttgtacctagaagactatctggaaatgattgagcagcttcctatggatctgcgggaccgcttcacggaaatgcgcgagatggacctgcaggtgcagaatgcaatggatcaactagaacaaagagtcagtgaattctttatgaatgcaaagaaaaataaacctgagtggagggaagagcaaatggcatccatcaaaaaagactactataaagctttggaagatgcagatgagaaggttcagttggcaaaccagatatatgacttggtagatcgacacttgagaaagctggatcaggaactggctaagtttaaaatggagctggaagctgataatgctggaattacagaaatattagagaggcgatctttggaattagacactccttcacagccagtgaacaatcaccatgctcattcacatactccagtggaaaaaaggaaatataatccaacttctcaccatacgacaacagatcatattcctgaaaagaaatttaaatctgaagctcttctatccacccttacgtcagatgcctctaaggaaaatacactaggttgtcgaaataataattccacagcctcttctaacaatgcctacaatgtgaattcctcccaacctctgggatcctataacattggctcgttatcttcaggaactggtgcaggggcaattaccatggcagctgctcaagcagttcaggctacagctcagatgaaggagggacgaagaacatcaagtttaaaagccagttatgaagcatttaagaataatgactttcagttgggaaaagaattttcaatggccagggaaacagttggctattcatcatcttcggcacttatgacaacattaacacagaatgccagttcatcagcagccgactcacggagtggtcgaaagagcaaaaacaacaacaagtcttcaagccagcagtcatcatcttcctcctcctcttcttccttatcatcgtgttcttcatcatcaactgttgtacaagaaatctctcaacaaacaactgtagtgccagaatctgattcaaatagtcaggttgattggacttacgacccaaatgaacctcgatactgcatttgtaatcaggtatcttatggtgagatggtgggatgtgataaccaagattgccctatagaatggttccattatggctgcgttggattgacagaggcaccaaaaggcaaatggtactgtccacagtgcactgctgcaatgaagagaagaggcagcagacacaaataaaggtggtccttttgtttgatgaagaaataaacttcagctgaagattttatataggactttaaaaagaagagaagagaaagaagaaacaatgcatttccaggcaaccacttaaaggatttacatagacaatcctataagatcttgaacttgaattttatgggttgtattttaataatgtaagtaaattatttatgcactcctggtgtgctatgaatattattccagttagccttggattatttcagtggccaacatatgcagacatttgtactcctcaaccattttctcaaagtaatgggcattctatgatttagacttcaaggaattccaatgatgaagattttaaggaaagtattttatattcaacaggtatattctgctgcatgtactgtactccagagctgttatgtaacactgtatataaatggttgcaaaaaaa

SEQ ID NO: 22913 - DNA, 1546 bp, Homo Sapiens
cacggccggagagacgcggaggaggagacatgagccggcgggcgcccagacggagcggccgtgacgctttcgcgctgcagccgcgcgccccgaccccggagcgctgacccctggccccacgcagctccgcgcccgggccggagagcgcaactcggcttccagacccgccgcgcatgctgtccccggactgagccgggcagccagcctcccacggacgcccggacggccggccggccagcagtgagcgagcttccccgcaccggccaggcgcctcctgcacagcggctgccgccccgcagcccctgcgccagcccggagggcgcagcgctcgggaggagccgcgcggggcgctgatgccgcagggcgcgccgcggagcgccccggagcagcagagtctgcagcagcagcagccggcgaggagggagcagcagcagcggcggcggcggcggcggcggcggcggaggcgcccggtcccggccgcgcggagcggacatgtgcaggctgggctaggagccgccgcctccctcccgcccagcgatgtattcagcgccctccgcctgcacttgcctgtgtttacacttcctgctgctgtgcttccaggtacaggtgctggttgccgaggagaacgtggacttccgcatccacgtggagaaccagacgcgggctcgggacgatgtgagccgtaagcagctgcggctgtaccagctctacagccggaccagtgggaaacacatccaggtcctgggccgcaggatcagtgcccgcggcgaggatggggacaagtatgcccagctcctagtggagacagacaccttcggtagtcaagtccggatcaagggcaaggagacggaattctacctgtgcatgaaccgcaaaggcaagctcgtggggaagcccgatggcaccagcaaggagtgtgtgttcatcgagaaggttctggagaacaactacacggccctgatgtcggctaagtactccggctggtacgtgggcttcaccaagaaggggcggccgcggaagggccccaagacccgggagaaccagcaggacgtgcatttcatgaagcgctaccccaaggggcagccggagcttcagaagcccttcaagtacacgacggtgaccaagaggtcccgtcggatccggcccacacaccctgcctaggccaccccgccgcggcccctcaggtcgccctggccacactcacactcccagaaaactgcatcagaggaatatttttacatgaaaaataaggaagaagctctatttttgtacattgtgtttaaaagaagacaaaaactgaaccaaaactcttggggggaggggtgataaggattttattgttgacttgaaacccccgatgacaaaagactcacgcaaagggactgtagtcaacccacaggtgcttgtctctctctaggaacagacaactctaaactcgtccccagaggaggacttgaatgaggaaaccaacactttgagaaaccaaagtcctttttcccaaaggttctgaaaggaaaaaaaaaaaaaaacaaaaaaaaaaaaaaaa

SEQ ID NO: 22914 - DNA, 14807 bp, Homo Sapiens
tcttggagcgttctcagtttctcaacagatcttcacttgctaggcagccagaagccggcggcagtggcggcaccgcctcctcctcacattcccggggtggcggggttagatgagcggccccagtcgcggcgccgggggcgctgttcatgccggttcccgacggctccgtggctgctgcggggctggggctggggctacccgccgcggactccccgggtcactaccagctgctgctgtcaggccgggccctggccgaccgctaccggaggatttataccgctgcgctcaatgacagggaccaggggggcggcagcgctggacacccagcctccaggaataagaaaattttaaataagaagaaattgaaaagaaaacagaagagcaaatcaaaagtgaagacaagaagcaagtctgaaaacttagagaatacagtaatcataccagatatcaaactacatagcaatccttctgctttcaatatttactgtaatgtacgccattgcgttctggaatggcagaaaaaggaaatatcattggcagccgcatctaagaactctgtgcagagtggagaatcagatagtgatgaagaagaggaatccaaagagccccctatcaagcttccaaagattattgaggttggcctttgtgaagtttttgaattgatcaaagagacacgattttctcatccatccctgtgtctcaggagtctccaagccctgctcaacgtgctgcagggccagcagccagaagtgctccagtctgagccacctgaggtcctagagtctctcttccagcttcttttggaaatcaccgttcgaagtactgggatgaatgacagcacaggacagtccttaacagcactttcctgtgcttgcctctttagtctggtggcttcttggggagaaacaggaaggacacttcaggccatctctgctatcctcaccaacaatggaagccatgcttgccaaactattcaggtgccaacaattctaaattcgctacagagaagtgtacaagcagttttggtgggaaaaattcaaattcaggactggtttagtaatggcattaagaaagcagctttaatgcacaagtggccattaaaagaaatatctgttgatgaagatgaccaatgtctacttcagaatgatggattttttctttatctattatgcaaggatggattatataaaataggctctggatacagtggaacagttaggggccatatatacaattctacatcccgtattagaaacagaaaagaaaaaaagtcttggttagggtatgctcagggttatttattatatagagatgtgaataaccacagcatgacagccataaggataagccctgaaacactggagcaagatggtactgtgatgttaccagattgccacactgaaggtcaaaatattttattcactgatggagaatatattaatcagatagctgcttcaagagatgatggctttgttgtcagaatatttgccacaagcactgaacctgttctacagcaagaattgcaacttaaactggctagaaaatgcttacatgcctgtcgtatctcattattcgatctggaaaaggacttgcatattataagtacaggatttgatgaggagtcagcaattcttggtgcaggacgagagtttgcgctaatgaaaacagcaaatggaaagatatattacactggcaaataccagagtcttggaatcaaacaaggtggtccttcagcaggaaaatgggttgagctaccaattacaaaatctccaaagatagtacacttctcagttggacacgatggctctcacgcccttttagttgcagaagatgggagcatattctttacaggatctgctagtaaaggagaagatggagaatcaattaagagcagacggcaatccaaaccttataaacctaaaaagataattaagatggaaggaaagattgtggtatatacagcctgcaataatggaagtagttctgttatttctaaagatggagaactctacatgtttggaaaagatgccatttactctgatagttcaagtttggtaactgatttgaagggccattttgtaactcaggtagctatgggcaaagctcacacttgtgttttaatgaagaatggagaggtgtggacatttggtgtaaataataaaggacagtgtggacgagatactggtgccatgaaccaaggtgggaaagggtttggagttgaaaatatggcaacagcaatggatgaagacctggaagaagaactagatgaaaaagatgagaagtctatgatgtgccctccaggcatgcacaaatggaagctggagcagtgcatggtttgcactgtctgtggagactgtacaggttatggagccagctgtgtcagtagtggacggccagacagagtccccggagggatctgtggttgtggttccggagaatctggttgtgctgtgtgtggatgttgcaaggcctgtgcaagagagttagatggtcaagaggcaagacaaagaggaattcttgatgcagtgaaagaaatgatacctttagatcttcttttagctgtcccagtgcccggggttaacattgaagaacaccttcagttacgacaagaagaaaaacggcaacgtgtaatcagaaggcacagattagaggaaggaagaggcccccttgtatttgctggtcctatttttatgaaccatcgagaacaggctctagccagactcagatcccatccagcacacgtaaagcataaacgggacaagcacaaagatggaagtggagaaagaggcgaaaaggatgcaagcaaaatcacaacataccctccaggctctgtgcgatttgactgtgagctccgggcagtccaagtcagctgtggatttcaccattcagtggttttaatggaaaatggagatgtctatacatttggttatgggcagcatgggcagctaggacatggagatgtcaactccaggggatgtcccactcttgttcaagcattgccaggccctagcacacaagtcactgcaggcagcaaccatacggcagtacttttaatggatggacaggtcttcacatttggaagtttttctaaaggacaactgggcagaccaattttggatgtgccatattggaatgcaaagccagctcccatgcctaacattggatcaaaatatggaagaaaagctacttggataggtgcaagtggggaccaaacttttttacgaattgatgaagcacttattaattctcatgtacttgctacatcagaaatttttgccagtaaacacataataggcttggtacctgcttctatatcagaacctcctccatttaaatgccttctgataaataaagtggatgggagttgtaaaacttttaatgactcagaacaagaggatctgcaaggatttggtgtgtgtcttgatcctgtatatgatgtaatttggaggtttcgaccaaatactagagagctgtggtgttacaatgcggtggttgctgatgccaggcttccctctgcagcagacatgcagtccagatgtagtatcctaagtcctgaacttgccttaccaacaggatcaagggccctcactacccgatctcatgcagctttgcacattttaggttgtcttgataccttggcagctatgcaggacttaaaaatgggtgttgcaagtacagaggaagagactcaagcagtaatgaaggtttattctaaagaagattatagtgtggtaaacaggtttgaaagtcatggaggaggctggggttattctgcccattcagtagaagctatacgtttcagtgccgacactgatattttacttggtggtcttggtctgtttggaggtagaggagaatatactgctaaaattaagctgtttgaattgggtcctgatggaggagatcatgaaactgatggtgaccttcttgcagagactgatgtattggcttatgactgtgctgctagagaaaaatatgcaatgatgtttgatgagcctgttctcctgcaagctgggtggtggtatgtggcatgggcccgagtgtcaggacccagcagtgactgtggatctcatggacaggcatctattaccacagatgatggggttgttttccagttcaagagttcaaagaaatcaaataatggtacagatgttaatgcgggtcagatacctcagttattatacagacttccaaccagtgatggcagtgcttcaaaaggcaaacagcaaaccagtgaacctgtacacattttaaagaggtcttttgcaagaactgtctcagtggaatgttttgagtcattgttgagtattcttcactggagctggaccaccttagtcttaggagttgaagaacttagaggattaaaaggattccagttcacagctacactcctagatttagagagactgcgctttgtgggtacctgttgtctgaggttattgcgtgtctatacctgtgaaatttacccagtgtcagctacaggaaaagcagttgtagaagaaactagcaaattagcagagtgtattggaaaaaccagaactttgttaagaaaaattttatcagaaccacttgatcactgcatggtgaaattggataatgatcctcaaggatatctcagtcaacccttgagtcttctagaagctgtccttcaggaatgtcataatactttcactgcctgctttcattctttctacccaactcctgccttacagtgggcttgcctttgtgatctgctgaattgtttggatcaggatatccaagaagcaaacttcaagacatcaagtagccgactccttgcagctgttatgtcagctctgtgtcacacgtctgttaagctgacttccatcttcccgattgcgtatgatggagaagtattactacgatcaattgttaaacaagttagtacagagaacgactcaacactagttcatcgttttccccttttggtggcacatatggaaaaactcagccagagtgaagagaatatctcagggatgacaagcttccgtgaagttctggagaaaatgctggtcattgttgtgctaccagtcaggaacagcctgaggagagaaaatgaactcttctcctcccacctcgtctctaacacctgtggattactggccagcattgtcagtgaactgacagcgtcagccctgggatctgaggttgatggacttaattctcttcactctgtaaaagctagtgctaaccgatttacaaaaacaagtcagggcagaagttggaacactgggaacgggtcccctgatgcaatctgtttttcagtagacaaacctggaatagttgtggttggtttctctgtctatggaggaggtggaattcatgaatatgaattagaggtgttggttgatgatagtgaacatgcaggagattcaactcattcccacagatggacatctctggaattagtgaaaggaacgtacacaacggatgactcacccagtgatatagctgagatcagacttgacaaagtggttcctttaaaggaaaatgttaaatatgctgtgcgcttgaggaactatggaagccgtacagccaatggagatggaggaatgaccacagttcagtgccctgatggtgtgacattcacattcagcacgtgcagcttgagcagtaacggcacaaaccaaaccagaggacagatcccacagatactctactataggagtgaatttgatggagatttacaatcccaacttctgagtaaagccaatgaagaagataaaaactgtagcagagcattgtctgttgtaagcactgtcgttcgagcctctaaggacctcctgcacagagctcttgctgtggatgctgatgacattccagaactgctgagttcttccagtctgttttccatgctgctcccccttattatagcctacataggaccagtagctgctgctattcccaaggtggctgtagaagtctttggccttgtccaacaattgcttccgtcagttgccattttgaatcagaagtatgcaccgcctgccttcaaccctaatcagtcgacagatagcaccacaggaaaccagcctgaacagggcctctctgcttgtacaacctccagtcactatgctgtcatagagagtgagcacccgtataaacctgcctgtgtgatgcattacaaggtgacattcccagaatgtgtgaggtggatgacaatcgaatttgaccctcagtgtggtactgcacagtcagaagatgtccttcgtttgttgattcctgtcagaactgttcagaattcaggatatggaccaaaattgacatctgttcatgaaaatcttaattcatggatagaattaaagaaattttcaggatcctctgggtggcctactatggttttggtgttgccaggaaatgaggcccttttttcattggagactgcatcagattatgtgaaagatgacaaagcttctttctatggttttatgtgttttgcaattggatatgaatttagccctggacctgatgagggagtcatccaattggaaaaagaattagccaatcttggtggggtttgtgcagcagctctgatgaagaaggacctagcacttcctattggtaatgaattagaagaagaccttgaaattcttgaggaggctgcattgcaggtgtgcaaaacccattctggaattcttggaaagggtctagctctttctcattcaccaactatattagaagcacttgagggaaatttaccactccaaatccaaagcaatgaacagtcttttctggatgattttattgcctgtgtcccaggatcaagtggtggaaggcttgcaaggtggcttcagccagattcatatgcggatcctcagaaaacatctttgatcctgaataaggatgatattcgttgtggttggcctaccaccataactgttcaaacaaaagaccagtatggggatgtggtacatgttcccaatatgaaggtggaagtgaaagctgtccctgtttctcagaaaaaaatgtctttacaacaagatcaagcaaagaaacctcaaaggattcctggcagtcctgcagtaacagctgcatcttctaatactgacatgacttatggagggctggcatcaccaaagctagatgtttcatatgaaccaatgatagtgaaggaagctcgatatattgccataacaatgatgaaggtttatgaaaattattcatttgaagaactacgttttgcatcaccaactcctaagagacccagtgagaatatgctgatccgtgtcaataatgatgggacttattgtgcaaattggactccaggggctattggactctacactcttcatgttaccattgatggcattgaaatcgatgctggtctggaagtaaaagtaaaagacccaccaaaagggatgataccaccaggaactcagttggtcaaaccaaagtctgaacctcagcctaataaggttcgaaaatttgtggccaaggacagtgcggggcttcgcatccgtagccacccttcccttcagagtgagcagataggcatagtgaaagtcaatggaactatcacttttattgatgagatccataatgatgatggtgtgtggctgaggctgaatgatgagacaataaagaagtatgtccctaacatgaatggttacactgaagcctggtgcctctcttttaatcaacatcttggcaagagtcttctggtccctgttgacgaatctaaaactaatactgatgactttttcaaagacataaactcctgctgcccacaggaagcaacaatgcaagaacaagatatgccattcttgcgaggagggccaggcatgtacaaggtagtgaagacgggaccttcaggtcacaacatcagaagctgccctaaccttagaggtatcccaattggaatgttagttctgggaaacaaagtcaaagcagtgggagaggtaaccaattctgaagggacatgggtgcaactggatcagaacagcatggtagagttctgtgagagtgatgaaggagaggcatggtccttagctagagacagaggcggaaaccagtacctccgacatgaagatgaacaagctcttctggatcagaattctcaaactcctcctccaagccctttctcagtgcaagcttttaataaaggggcaagttgcagtgcccaaggatttgattatggactcggaaatagcaaaggtgatcgaggaaacatctcaacatcttctaaaccagcctctacatcaggaaaatcagagctgtcctctaaacacagcagatcgcttaaacctgatggacgtatgagccggactactgctgatcagaagaagccaaggggcacagaaagtttatctgctagtgaatccctcatcttaaaatctgatgctgcaaagttgaggtcagattcccacagtaggtcattatcccccaaccataacaccttgcagacattgaaatctgatgggaggatgccttctagctccagagctgaatccccaggaccaggttctcggttgtcatctcctaagccaaagactctcccagccaataggtctagcccatcgggtgctagttctccacgctcctcctcaccacatgataaaaatctacctcaaaaaagtactgctcctgttaagacaaagcttgatcctcctcgggaacgttctaaatcagactcttacacacttgatccagataccctccgcaagaagaaaatgcccctcacagaacctttgagaggacggtcaacgtcaccaaaaccaaaatcagtaccaaaggattctacagattcccctggatctgaaaatagagctccctctccccatgtggtacaggaaaacctccacagtgaggtggtcgaagtctgcacctcaagtactttaaaaacaaatagtctaacagacagcacctgcgatgacagcagtgaatttaagagtgtggatgaaggttcaaataaagttcattttagcattggaaaagcaccactgaaagatgaacaggaaatgagagcatctcccaaaataagtcgaaaatgtgctaatagacacaccaggcccaaaaaagaaaaatcgagttttcttttcaaaggagatggatccaagcctttagagccagccaagcaagccatgtctccttctgtggccgaatgtgccagagctgtgtttgcttccttcctctggcatgaaggcatagtacatgatgcaatggcttgttcttctttcctaaagtttcatcctgaactttccaaagaacatgctcctataaggagtagtttaaatagccaacaacctacagaagaaaaagaaaccaagttaaaaaatagacattcattagaaatatcatctgcactgaatatgtttaatattgcaccccatggaccagatatatctaagatgggtagcatcaacaaaaacaaggtattgtctatgcttaaggaaccacctctgcatgaaaaatgtgaggatgggaaaaccgagaccacttttgaaatgtccatgcataacacaatgaagtctaagtctcctcttcccttaactttacaacatttagtggctttttgggaagacatctctttggctactatcaaagctgcttcccagaatatgatttttccaagtcctggttcctgtgcagttcttaaaaagaaagagtgtgagaaaggaaggaataagaagtccaaaaaggaaaaaaagaaaaaagaaaaggcagaagttaggcccaggggtaatttgtttggagagatggcccagctggcagtaggaggaccagagaaagataccatctgtgaactgtgtggggagtcacatccatacccggtgacctatcacatgagacaagctcacccaggttgtggccgatatgctggtggacaaggttacaatagcattgggcatttttgtggaggatgggctggtaactgtggtgatggtggcataggaggaagcacttggtatctggtatgtgatcgctgtagagaaaaatacctccgcgaaaaacaggctgctgcaagggagaaggtcaaacaatctaggagaaaaccaatgcaagtcaagacccctcgtgccttgcccaccatggaagctcaccaggtgattaaagccaatgcactcttcctgctgtccctgagcagtgcagcagaaccgagcattctgtgttaccatcctgcaaagccattccaatctcagttgcccagtgtaaaagaaggcatttctgaggatcttcctgtgaaaatgccttgtctgtacctgcagacattagctaggcatcatcatgaaaattttgtgggctatcaagatgacaatctattccaggatgaaatgagatatctacgttcaacatctgtacctgccccgtatatatcagtaactcctgatgcaagtcctaatgtatttgaagagccagagagcaatatgaagtctatgccaccaagtttagaaaccagtcccataactgatactgatcttgcaaagagaactgtcttccaaagatcatactcagttgttgcttccgaatatgataaacaacactccattttacctgcacgagttaaagctattcctagaagaagagttaacagtggagacactgaagttggttcttcccttttgagacatccgtctcctgagctttctcggctaatctcagcccacagctctctttctaaaggagaacgaaatttccagtggccagttttagcttttgttatacaacatcatgatctagaaggtcttgaaatagcaatgaaacaggccctaaggaaatctgcttgtcgagtttttgctatggaggctttcaactggcttctgtgtaatgtcatccaaaccacttctctccatgatattctgtggcattttgtggcatcactgactcctgcaccagtggaaccagaggaagaagaggatgaagaaaataaaacaagcaaagaaaattcagaacaagagaaagatacaagagtatgtgaacatccactctcagacatagtgattgccggggaacgtgctcatcctttaccacacacctttcaccgcttgctgcagaccatctcagaccttatgatgtctctccccagcggcagttcattacagcaaatggccctgaggtgctggagtctcaaattcaagcaatctgatcaccagttccttcatcagagcaacgtctttcatcacattaacaatattttgtcaaagtcagatgatggcgatagtgaagagagttttagcatcagtatacagtctggctttgaagctatgagtcaggaattatgcatagtaatgtgcttaaaggacttaaccagcattgttgacataaaaacttcaagccgacctgccatgattggcagtttgacagacggctccacagaaaccttttgggaatcaggagatgaagataaaaacaaaactaagaacatcaccatcaactgtgtaaaaggaatcaatgcccgctatgtgtctgttcacgtggacaattcccgagatcttgggaataaagttacctcaatgaccttcttaactggcaaagcagtagaagatttgtgcagaataaagcaggttgatctggattccaggcacattggctgggtaacaagtgaacttccaggaggggataatcacatcataaaaattgaattaaaaggcccagaaaatacactgagagttcgacaagtcaaagtcctgggctggaaagatggtgaaagcacaaaaatagctggccagatttcagccagtgtggcccagcagaggaactgtgaagctgagactctgcgagtattcagactgattacgtctcaagtatttggaaagctcatctctggagatgctgaacctacaccagaacaagaggaaaaagcactattgtcatcacctgaaggagaagaaaaagtatacaatgcaacatcagatgctgacctgaaagaacatatggttggaatcatattcagcaggagtaagctgactaacttacaaaaacaggtgtgtgctcatattgtccaagctattcgcatggaagctaccagagtccgtgaagaatgggaacatgctatatcaagcaaagaaaatgccaattctcagccaaatgatgaagatgcctcctctgatgcctactgctttgagctgctctctatggttttagcactgagtggctctaacgttggccggcaatatctggctcaacagctaaccctgcttcaggatctcttctcgctgcttcacacagcctctcctagagtccagagacaggtaacctctttactaagaagagttttgcctgaagtaacccctagtcgtctggccagcatcataggagtgaaatccctccccccagcagatatcagtgatatcattcactcaacagagaaaggagactggaataagctgggtatcttggacatgtttctaggatgcattgccaaagcactcactgtacagctaaaagccaaaggaaccaccatcactggaacagctggtaccactgtgggcaaaggagttacaacagttactcttccgatgattttcaattccagttatctccgacgaggtgaaagtcattggtggatgaagggctcaacccctacccagatctcagagatcatcattaaacttatcaaggatatggcagcaggtcatctgtcagaagcttggtcccgagtgacaaaaaatgctattgcagaaaccatcattgccttgaccaagatggaagaagaatttaggtctccagtgagatgtattgcaacaactagactctggcttgctctcgcatccctatgtgttcttgatcaggaccacgtagatcgtctctcctcggggagatggatgggaaaggatggacaacaaaaacaaatgcctatgtgtgataaccatgatgatggtgaaactgcagcaatcattttatgcaatgtctgtggaaatttatgtacagactgtgacagattccttcaccttcatcgaagaaccaaaactcatcaaagacaggtcttcaaagaagaagaagaagctataaaggttgaccttcatgaaggttgtggtagaaccaaattgttctggttgatggcactggcagattctaaaacaatgaaggcaatggtggaattccgagaacacacaggcaaacccaccacgagtagctcagaagcatgtcgcttctgtggttccaggagtggaacagagttatctgctgttggcagtgtttgttctgatgcagattgccaggaatacgctaagatagcctgtagtaagacgcatccttgtggccatccatgcgggggtgttaaaaacgaagagcactgtctgccctgtctacacggctgtgacaaaagtgccacaagcctgaagcaagacgccgatgacatgtgcatgatatgtttcaccgaagcgctctcggcagcaccagccattcagctggattgtagtcacatattccacttacagtgctgtcggcgagtattagaaaatcgatggcttggcccaaggataacatttggatttatatcttgtcccatttgcaagaacaaaattaatcacatagtactaaaagacctacttgatccaataaaagaactctatgaggatgtcagaagaaaagccttaatgagattggaatatgaaggtctgcataagagtgaagctatcacaactcctggtgtgaggttttataatgacccagctggctatgcaatgaatagatatgcatattatgtgtgctacaaatgcagaaaggcatattttggtggtgaagctcgctgcgatgctgaggctggacggggagatgattatgatcccagagagctcatttgtggtgcctgttctgatgtttccagggctcagatgtgtcccaaacatggcacagactttttggaatataaatgtcgctactgctgttcagtggctgtttttttctgttttggaacaacacatttttgtaatgcttgtcatgatgattttcaaagaatgactagcattcctaaggaagaactaccacactgtcctgcaggtcccaaaggcaagcagttagaaggaactgaatgtccactccatgttgttcatccacccactggggaagagtttgctctgggatgtggagtgtgcagaaatgcccacactttttagaacacgcagatcctttgtctacagagagaaaaattgccttcatcccccaagaggatgcggtgaagtttaaactctgctcaccataaggacgggaccatttttacatccatgaaaatgaaccattcacagtgcaagaaggataccaaataccatgtacataattcttgctatgaaaagtttccccattattttggtttatcttcttttgaacaaatgacatcaaacttgtgaggtgtttgcatgtggccattaccgtcattggcctgtgaagcattggacatttatagataattgatataaaagaatcgccatgcccatggactaagaacgatgctggctttcaagcaaaaaagaaaaataatcattgtttattgtatactgcctttttgtaatcctgtacaattgcatcacgggtggggataaaaagaggaatattctggtttatttcctagactgttatttaaaaaaaaaaaaaacattgtgttaggacagcatataaatgtaataagtatcacactgtatataaacatatcaatgtttgtcctgtataagaattactaaattacaaatgcaatttcatttaaacttctaggttaagtttgagcctgaaattttaatgaagtgcaatactgagtgtgcctcattatcttgcagctgtaaacatattggaatgtacatgtcaataaaaccactgtacatttttatacagtgataaagtctaaaaaaaaaaaaaaa

SEQ ID NO: 22915 - DNA, 2074 bp, Homo Sapiens
ggcggagacagagtgaagaaactgtgttccccccttgggttgctatcgatcaagggtaaaattccattctgatatcaaaatgcagtattcgcaccattgtgagcaccttttagagagactgaacaaacagcgggaagcaggttttctctgtgactgtaccatagtgattggggaattccagtttaaagctcataggaatgtgctggcctcctttagtgagtattttggtgcgatctacagaagcacttctgagaacaatgtctttcttgatcagagtcaggtgaaggctgatggatttcagaaactgttggagtttatatacacaggaactttaaatcttgacagttggaatgttaaagaaattcatcaggctgctgactatctcaaagtggaagaggtggtcactaaatgcaaaataaagatggaagattttgcttttattgctaatccttcttctacagagatatctagtattactggaaacattgaattgaatcaacagacttgtcttcttactctgcgagattataataatcgagagaaatcagaagtatctacagatttgattcaggcaaatcctaaacaaggcgcgttagcgaaaaagtcatctcaaacgaaaaagaagaagaaggctttcaactccccgaaaacagggcagaataaaacagtgcaatatcccagtgacatcttagagaatgcatctgttgaattattcctagatgcaaataaactgcccacacctgtagtagaacaagttgcacaaataaatgataattcagaactcgagttgacatcagttgtggaaaatacttttccagcacaagatattgtgcacactgttacagtgaaacggaaacgtggaaaatcacagccaaactgtgctctgaaagaacactctatgtctaatatagccagcgtcaagagtccttatgaggcggagaactccggggaagagctggatcagaggtattccaaggccaagccaatgtgtaacacatgtgggaaagtgttttcagaagccagcagtttgagaaggcacatgagaatacataaaggagtcaaaccttacgtctgccacttatgtggaaaggcatttacccaatgtaaccagctgaaaacgcatgtaagaactcatacaggtgagaagccatacaaatgtgaattgtgtgataaaggatttgctcagaaatgtcagctagtcttccatagtcgcatgcatcatggtgaagaaaaaccctataaatgtgatgtatgcaacttacagtttgcaacttctagcaatctcaagattcatgcaaggaagcatagtggagagaagccatatgtctgtgataggtgtggacagagatttgctcaagccagcacactgacctatcatgtccgtaggcatactggagaaaagccttatgtatgtgatacctgtgggaaggcatttgctgtctctagttctcttatcactcattctcgaaaacatacaggtgaaaaaccatacatatgtggtatttgtgggaaaagttttatttcctcaggagagctcaacaaacactttcggtcccatacaggagaaagaccatttatctgcgaattatgtggaaattcttacacagatattaaaaatttaaagaagcacaaaacaaaagtccattctggtgcagataaaactctagactccagtgcagaggatcatactttgagtgaacaggattccatacaaaaaagtcctttatcagaaactatggatgtgaagccttctgatatgactttaccattagctcttccacttgggactgaggaccatcacatgcttctgcctgtcacggatactcagtctcctacatcagatacattgttgaggtcaactgtgaatgggtattcagaaccacagttgatttttttacaacaattatactgactttgtaaggaatatggaattgctaagatatcattggtagcaaacatctctggtaaggtgcatatattcatattaaattcccattcatttgagttgtgaccattatttttcattcactgaagtaaaagcacctgatgctgcatcacaaaaaaaaaaaaaaaa

SEQ ID NO: 22916 - DNA, 4535 bp, Homo Sapiens
acccacgacgacagaaggcgccgatggccgcgcctgctgagccctgcgcggggcagggggtctggaaccagacagagcctgaacctgccgccaccagcctgctgagcctgtgcttcctgagaacagcaggggtctgggtaccccccatgtacctctgggtccttggtcccatctacctcctcttcatccaccaccatggccggggctacctgtggatgtccccactcttcaaagccaagatggtgcttggattcgccctcatagtcctgtgtacctccagcgtggctgtcgctctttggaaaatccaacagggaacgcctgaggccccagaattcctcattcatcctactgtgtggctcaccacgatgagcttcgcagtgttcctgattcacaccgagaggaaaaagggagtccagtcatctggagtgctgtttggttactggcttctctgctttgtcttgccagctaccaacgctgcccagcaggcctccggagcgggcttccagagcgaccctgtccgccacctgtccacctacctatgcctgtctctggtggtggcacagtttgtgctgtcctgcctggcggatcaaccccccttcttccctgaagacccccagcagtctaacccctgtccagagactggggcagccttcccctccaaagccacgttctggtgggtttctggcctggtctggaggggatacaggaggccactgagaccaaaagacctctggtcgcttgggagagaaaactcctcagaagaacttgtttcccggcttgaaaaggagtggatgaggaaccgcagtgcagcccggaggcacaacaaggcaatagcatttaaaaggaaaggcggcagtggcatgaaggctccagagaccgagcccttcctacggcaagaagggagccagtggcgcccactgctgaaggccatctggcaggtgttccattctaccttcctcctggggaccctcagcctcatcatcagtgatgtcttcaggttcactgtccccaagctgctcagccttttcctggagtttattggtgatcccaagcctccagcctggaagggctacctcctcgccgtgctgatgttcctctcagcctgcctgcaaacgctgtttgagcagcagaacatgtacaggctcaaggtgctgcagatgaggttgcggtcggccatcactggcctggtgtacagaaaggtcctggctctgtccagcggctccagaaaggccagtgcggtgggtgatgtggtcaatctggtgtccgtggacgtgcagcggctgaccgagagcgtcctctacctcaacgggctgtggctgcctctcgtctggatcgtggtctgcttcgtctatctctggcagctcctggggccctccgccctcactgccatcgctgtcttcctgagcctcctccctctgaatttcttcatctccaagaaaaggaaccaccatcaggaggagcaaatgaggcagaaggactcacgggcacggctcaccagctctatcctcaggaactcgaagaccatcaagttccatggctgggagggagcctttctggacagagtcctgggcatccgaggccaggagctgggcgccttgcggacctccggcctcctcttctctgtgtcgctggtgtccttccaagtgtctacatttctggtcgcactggtggtgtttgctgtccacactctggtggccgagaatgctatgaatgcagagaaagcctttgtgactctcacagttctcaacatcctcaacaaggcccaggctttcctgcccttctccatccactccctcgtccaggcccgggtgtcctttgaccgtctggtcaccttcctctgcctggaagaagttgaccctggtgtcgtagactcaagttcctctggaagcgctgccgggaaggattgcatcaccatacacagtgccaccttcgcctggtcccaggaaagccctccctgcctccacagaataaacctcacggtgccccagggctgtctgctggctgttgtcggtccagtgggggcagggaagtcctccctgctgtccgccctccttggggagctgtcaaaggtggaggggttcgtgagcatcgagggtgctgtggcctacgtgccccaggaggcctgggtgcagaacacctctgtggtagagaatgtgtgcttcgggcaggagctggacccaccctggctggagagagtactagaagcctgtgccctgcagccagatgtggacagcttccctgagggaatccacacttcaattggggagcagggcatgaatctctccggaggccagaagcagcggctgagcctggcccgggctgtatacagaaaggcagctgtgtacctgctggatgaccccctggcggccctggatgcccacgttggccagcatgtcttcaaccaggtcattgggcctggtgggctactccagggaacaacacggattctcgtgacgcacgcactccacatcctgccccaggctgattggatcatagtgctggcaaatggggccatcgcagagatgggttcctaccaggagcttctgcagaggaagggggccctcgtgtgtcttctggatcaagccagacagccaggagatagaggagaaggagaaacagaacctgggaccagcaccaaggaccccagaggcacctctgcaggcaggaggcccgagcttagacgcgagaggtccatcaagtcagtccctgagaaggaccgtaccacttcagaagcccagacagaggttcctctggatgaccctgacagggcaggatggccagcaggaaaggacagcatccaatacggcagggtgaaggccacagtgcacctggcctacctgcgtgccgtgggcacccccctctgcctctacgcactcttcctcttcctctgccagcaagtggcctccttctgccggggctactggctgagcctgtgggcggacgaccctgcagtaggtgggcagcagacgcaggcagccctgcgtggcgggatcttcgggctcctcggctgtctccaagccattgggctgtttgcctccatggctgcggtgctcctaggtggggcccgggcatccaggttgctcttccagaggctcctgtgggatgtggtgcgatctcccatcagcttctttgagcggacacccattggtcacctgctaaaccgcttctccaaggagacagacacggttgacgtggacattccagacaaactccggtccctgctgatgtacgcctttggactcctggaggtcagcctggtggtggcagtggctaccccactggccactgtggccatcctgccactgtttctcctctacgctgggtttcagagcctgtatgtggttagctcatgccagctgagacgcttggagtcagccagctactcgtctgtctgctcccacatggctgagacgttccagggcagcacagtggtccgggcattccgaacccaggccccctttgtggctcagaacaatgctcgcgtagatgaaagccagaggatcagtttcccgcgactggtggctgacaggtggcttgcggccaatgtggagctcctggggaatggcctggtgtttgcagctgccacgtgtgctgtgctgagcaaagcccacctcagtgctggcctcgtgggcttctctgtctctgctgccctccaggtgacccagacactgcagtgggttgttcgcaactggacagacctagagaacagcatcgtgtcagtggagcggatgcaggactatgcctggacgcccaaggaggctccctggaggctgcccacatgtgcagctcagcccccctggcctcagggcgggcagatcgagttccgggactttgggctaagataccgacctgagctcccgctggctgtgcagggcgtgtccttcaagatccacgcaggagagaaggtgggcatcgttggcaggaccggggcagggaagtcctccctggccagtgggctgctgcggctccaggaggcagctgagggtgggatctggatcgacggggtccccattgcccacgtggggctgcacacactgcgctccaggatcagcatcatcccccaggaccccatcctgttccctggctctctgcggatgaacctcgacctgctgcaggagcactcggacgaggctatctgggcagccctggagacggtgcagctcaaagccttggtggccagcctgcccggccagctgcagtacaagtgtgctgaccgaggcgaggacctgagcgtgggccagaaacagctcctgtgtctggcacgtgcccttctccggaagacccagatcctcatcctggacgaggctactgctgccgtggaccctggcacggagctgcagatgcaggccatgctcgggagctggtttgcacagtgcactgtgctgctcattgcccaccgcctgcgctccgtgatggactgtgcccgggttctggtcatggacaaggggcaggtggcagagagcggcagcccggcccagctgctggcccagaagggcctgttttacagactggcccaggagtcaggcctggtctga

SEQ ID NO: 22917 - DNA, 12563 bp, Homo Sapiens
cgcgccggggcctggtgctcggtcggcgggtgctgccgctttaagcgggggcgggactgcgcgcggccgagcggttgcgacgagggctcggctgggggtcgccggggtcgcgggccgggcctgcaggagccgggccgccgaggtcggggctggttgaactcatggacctgatacttttctcttgagaagcaaaccagcccaaaagaaaaatggcgtttgttgcaacacagggggccacggtggttgaccagaccactttgatgaaaaagtaccttcagtttgtggcagctctcacagatgtgaatacacctgatgaaacaaagttgaaaatgatgcaagaagttagtgaaaattttgagaatgtcacgtcatctcctcagtattctacattcctagaacatatcatccctcgattccttacatttctccaagatggagaagttcagtttcttcaggagaaaccagcacagcaactgcggaagctcgtacttgaaataattcatagaataccaaccaacgaacatcttcgtcctcacacaaaaaatgttttgtctgtgatgtttcgctttttagagacggaaaatgaagaaaatgttcttatttgtctaagaataattattgagctacacaaacagttcaggccaccgatcacacaagaaattcatcattttctggattttgtgaaacagatttacaaggagcttccaaaagtagtgaaccgctactttgagaaccctcaagtgatccccgagaacacagtgcctcccccagaaatggttggtatgataacaacgattgctgtgaaagtcaacccggagcgtgaggacagtgagactcgaacacattccatcattccgaggggatcactttctctgaaagtgttggcagaattgcccattattgttgttttaatgtatcagctctacaaactgaacatccacaatgttgttgctgagtttgtgcccttgatcatgaacaccattgccattcaggtgtctgcacaagcgaggcaacataagctttacaacaaggagttgtatgctgacttcattgctgctcagattaaaacattgtcatttttagcttacattatcaggatttaccaggagttggtgactaagtattctcagcagatggtgaaaggaatgctccagttactttcaaattgtccagcagagactgcacacctcagaaaggagcttctgattgctgccaaacacatcctcaccacagagctgagaaaccagttcattccttgcatggacaagctgtttgatgaatccatactaattggctcaggatatactgccagagagactctaaggcccctcgcctacagcacgctggccgacctcgtgcaccatgtccgccagcacctgcccctcagcgacctctccctcgccgtccagctcttcgccaagaacatcgacgatgagtccctgcccagcagcatccagaccatgtcctgcaagctcctgctgaacctggtggactgcatccgttccaagagcgagcaggagagtggcaatgggagagacgtcctgatgcggatgctggaggttttcgttctcaaattccacacaattgctcggtaccagctctctgccatttttaagaagtgtaagcctcagtcagaacttggagccgtggaagcagctctgcctggggtgcccactgcccctgcagctcctggccctgctccctccccagcccctgtccctgccccacctccacccccgcccccacccccacctgccacccctgtgaccccggcccccgtgcctcccttcgagaagcaaggagaaaaggacaaggaagacaagcagacattccaagtcacagactgtcgaagtttggtcaaaaccttggtgtgtggtgtcaagacaatcacgtggggcataacatcatgcaaagcacctggtgaagctcagttcattcccaacaagcagttacaacccaaagagacacagatttacatcaaacttgtgaaatatgcaatgcaagctttagatatttatcaggtccagatagcaggaaatggacagacatacatccgtgtggccaactgccagactgtgagaatgaaagaggagaaggaggtattggagcatttcgctggtgtgttcacaatgatgaaccccttaacgttcaaagaaatcttccaaactacggtcccttatatggtggagagaatctcaaaaaattatgctcttcagattgttgccaattccttcttggcaaatcctactacctctgctctgtttgctacgattctggtggaatatctccttgatcgcctgccagaaatgggctccaacgtggagctctccaacctgtacctcaagctgttcaagctggtctttggctctgtctccctctttgcagctgaaaatgaacaaatgctgaagcctcacttgcacaagattgtgaacagctctatggagctcgcgcagactgccaaggaaccctacaactacttcttgctgctacgggcgctgtttcgctctattggtggaggtagccacgatctcttgtatcaggagttcttgcctctccttccaaacctcctgcaagggctgaacatgcttcagagtggcctgcacaagcagcacatgaaggacctctttgtggagctgtgtctcaccgtccctgtgcggctgagctcgcttttgccgtacctgcccatgcttatggatcccttggtgtctgcactcaatgggtctcagacattggtcagccaaggcctcaggacgctggagctgtgtgtggacaacctgcagcccgacttcctctacgaccacatccagccggtgcgcgcagagcttatgcaggctctgtggcgcaccttacgcaaccctgctgacagcatctcccacgtggcctaccgtgtgctcggtaagtttggcggcagtaacaggaagatgctgaaggagtcgcagaagctgcactacgttgtgaccgaggttcagggccccagcatcactgtggagttttccgactgcaaagcttctctccagctccccatggagaaggccattgaaactgctctggactgcctgaaaagcgccaacactgagccctactaccggaggcaggcgtgggaagtgatcaaatgcttcctggtggccatgatgagcctggaggacaacaagcacgcactctaccagctcctggcacaccccaactttacagaaaagaccatccccaatgttatcatctcacatcgctacaaagcccaggacactccagcccggaagacttttgagcaggccctgacaggcgccttcatgtctgctgtcattaaggacctgcggcccagcgccctgccctttgtcgccagcttgatccgccactatacgatggtggcagtcgcccagcagtgtggccctttcttgctgccttgctaccaggtgggcagccagcccagcacagccatgtttcacagtgaagaaaatggctcgaaaggaatggatcctttggttctcattgatgcaattgctatttgtatggcatatgaagaaaaggagctttgcaaaatcggggaggtggccctagctgtgatatttgatgttgcaagtatcatcctgggctccaaggagagggcctgccagctgcccctgttttcttacatcgtggagcgcctgtgtgcatgttgttatgaacaggcgtggtatgcaaagctggggggtgtggtgtctattaagtttctcatggagcggctgcctctcacttgggttctccagaaccagcagacattcctgaaagcacttctctttgtcatgatggacttaactggagaggtttccaatggggcagtcgctatggcaaagaccacgctggagcagcttctgatgcggtgcgcaacgcctttaaaagacgaggagagagccgaagagatcgtggccgcccaggaaaagtctttccaccatgtgacacacgacttggttcgagaagtcacctctccaaactccactgtgaggaagcaggccatgcattcgctgcaggtgttggcccaggtcactgggaagagtgtcacggtgatcatggaaccccacaaagaggtcctgcaggatatggtcccccctaagaagcacctgctccgacaccagcctgccaacgcacagattggcctgatggaggggaacacgttctgtaccacgttgcagcccaggctcttcacaatggaccttaacgtggtggagcataaggtgttctacacagagctgttgaatttgtgtgaggctgaagattcagctttaacaaagctgccctgttataaaagccttccgtcactcgtacctttacgaattgcggcattaaatgcacttgctgcctgcaattaccttcctcagtccagggagaaaatcatcgctgcactcttcaaagccctgaattccaccaatagtgagctccaagaggccggagaagcctgtatgagaaagtttttagaaggtgctaccatagaagtcgatcaaatccacacacatatgcgacctttgctgatgatgctgggagattaccggagcttgacgctgaatgttgtgaatcgcctgacttcggtcacgaggctcttcccaaattccttcaatgataaattttgtgatcagatgatgcaacatctgcgcaagtggatggaagtggtggtgatcacccacaaagggggccagaggagcgacggaaacgaaatgaagatttgctcagcaattataaacctttttcatctgatcccggctgctcctcagacactggtgaagcctttgctagaggttgtcatgaaaacggagcgggcgatgctgatcgaggcggggagtccattccgagagcccctgatcaagttcctgactcgacatccctcgcagacagtggagctgttcatgatggaagccacactgaacgatccccagtggagcagaatgtttatgagttttttaaaacacaaagacgccagacctctgcgggatgtgctggctgccaaccccaacaggttcatcaccctgctgctgccggggggtgcccagacggctgtgcgccccggttcgcccagcaccagcaccatgcgcctggacctccagttccaggccatcaagatcataagcattatagtgaaaaacgatgactcctggctggccagccagcactctctggtgagccagttgcgacgtgtgtgggtgagtgagaacttccaagagaggcaccgcaaggagaacatggcagccaccaactggaaggagcccaagctgctggcctactgcctgctgaactactgcaaaaggaattacggagatatagaattgctgttccagctgctccgagcctttactggtcgttttctctgcaacatgacattcttaaaagagtatatggaggaagagattcccaaaaattacagcatcgctcagaaacgtgccctgttctttcgctttgtagacttcaacgaccccaacttcggagatgaattaaaagctaaagttctgcagcatatcttgaatcctgctttcttgtacagctttgagaagggggaaggagagcagctcttgggacctcccaatccagaaggagataacccagaaagcatcaccagtgtgtttattaccaaggtcctggaccccgagaagcaggcggacatgctggactcgctgcggatctacctgctgcagtacgccacgctgctggtggagcacgccccccaccacatccatgacaacaacaagaaccgcaacagcaagctgcgccgcctcatgaccttcgcctggccctgcctgctctccaaggcctgcgtggacccagcctgcaagtacagcggacacttgctcctggcgcacattatcgccaaattcgccatacacaagaagatcgtcctgcaggtttttcatagtctcctcaaggctcacgcaatggaagctcgagcgatcgtcagacaggcgatggccattctgaccccggcggtgccggccaggatggaggacgggcaccagatgctgacccactggacccggaagatcattgtggaggaggggcacaccgtcccgcagctggtccacattctgcacctgatagtgcaacacttcaaggtgtactacccggtacggcaccacttggtgcagcacatggtgagcgccatgcagaggctgggcttcacgcccagtgtcaccatcgagcagaggcggctggccgtggacctgtctgaagtcgtcatcaagtgggagctgcagaggatcaaggaccagcagccggattcagatatggacccaaattccagtggagaaggagtcaattctgtctcatcctccattaagagaggcctgtccgtggattctgcccaggaagtgaaacgctttaggacggccaccggagccatcagtgcagtctttgggaggagccagtcgctacctggagcagactctctcctcgccaagcccattgacaagcagcacacagacactgtggtgaacttccttatccgcgtggcctgtcaggttaatgacaacaccaacacagcggggtcccctggggaggtgctctctcgccggtgtgtgaaccttctgaagactgcgttgcggccagacatgtggcccaagtccgaactcaagctgcagtggttcgacaagctgctgatgactgtggagcagccaaaccaagtgaactatgggaatatctgcacgggcctagaagtgctgagcttcctgctaactgtcctccagtccccagccatcctcagtagcttcaaacctctgcagcgtggaattgccgcctgcatgacatgtggaaacaccaaggtgttgcgagccgtccacagccttctctcgcgcctgatgagcattttcccaacagagccgagtacttccagtgtggcctccaaatatgaagagctggagtgcctctacgcagccgtcggaaaggtcatctatgaagggctcaccaactacgagaaggccaccaatgccaatccctcccagctcttcgggacccttatgatcctcaagtctgcctgcagcaacaaccccagctacatagacaggctgatctccgtctttatgcgctccctgcagaagatggtccgggagcatttaaaccctcaggcagcgtcaggaagcaccgaagccacctcaggtacaagcgagctggtgatgctgagtctggagctggtgaagacgcgcctggcagtgatgagcatggagatgcggaagaacttcatccaggccatcctgacatccctcatcgaaaaatcaccagatgccaaaatcctccgggctgtggtcaaaatcgtggaagaatgggtcaagaataactccccaatggcagccaatcagacacctacactccgggagaagtccattttgcttgtgaagatgatgacttacatagaaaaacgctttccggaagaccttgaattaaatgcccagtttttagatcttgttaactatgtctacagggatgagaccctctctggcagcgagctgacggcgaaacttgagcctgcctttctctctgggctgcgctgtgcccagccactcatcagggcaaagtttttcgaggtttttgacaactccatgaaacgtcgtgtctacgagcgcttgctctatgtgacctgttcgcagaactgggaagccatggggaaccacttctggatcaagcagtgcattgagctgcttctggccgtgtgtgagaagagcacccccattggcaccagctgccaaggagccatgctcccgtccatcaccaacgtcatcaacctggccgatagccacgaccgtgccgccttcgccatggtcacacatgtcaagcaggagccccgggagcgggagaacagcgagtccaaagaggaggatgtagagatagacatcgaactagctcctggggatcagaccagcacgcccaaaaccaaagaactttcagaaaaggacattggaaaccagctgcacatgctaaccaacaggcacgacaagtttctggacactctccgagaggtgaagactggagcgctgctcagcgctttcgttcagctgtgccacatttccacgacgctggcagagaagacgtgggtccagcttttccccagattgtggaagatcctctctgacagacagcagcatgcactcgcgggtgagataagtccatttctgtgcagcggcagtcaccaggtgcagcgggactgccagcccagcgcgctgaactgctttgtggaagccatgtcccagtgcgtgccgccaatccccatccgaccctgcgtcctgaagtacctggggaagacacacaacctctggttccggtccacgctgatgttggagcaccaggcttttgaaaagggtctgagtcttcagattaagccgaagcaaacaacggagttttatgagcaggagagcatcaccccgccgcagcaggagatactggattcccttgcggagctttactccctgttacaagaggaagatatgtgggctggtctgtggcagaagcggtgcaagtactcggagacagcgactgcgattgcttacgagcagcacgggttctttgagcaggcacaagaatcctatgaaaaggcaatggataaagccaaaaaagaacatgagaggagtaacgcctcccctgctattttccctgaataccagctctgggaagaccactggattcgatgctccaaggaattgaaccagtgggaagccctgacggagtacggtcagtccaaaggccacatcaacccctacctcgtcctggagtgcgcctggcgggtgtccaactggactgccatgaaggaggcgctggtgcaggtggaagtgagctgtccgaaggagatggcctggaaggtgaacatgtaccgcggatacctggccatctgccaccccgaggagcagcagctcagcttcatcgagcgcctggtggagatggccagcagcctggccatccgcgagtggcggcggctgccccacgtagtgtcccacgtgcacacgcctctcctacaggcagcccagcaaatcatcgaactccaggaagctgcacaaatcaacgcaggcttacagccaaccaacctgggaaggaacaacagcctgcacgacatgaagacggtggtgaagacctggaggaaccgactgcccatcgtgtctgacgacttgtcccactggagcagcatcttcatgtggaggcagcatcattaccaggcgattgtaactgcctatgagaatagctctcagcatgatcccagttcaaataacgctatgcttggggttcatgcatcagcttcagcgatcatccagtatggaaaaatcgcccggaaacaaggactggtcaatgtagctctggatatattaagtcggattcatactattccaactgttcctatcgtggattgcttccagaagattcgacagcaagttaaatgctacctccagctggcaggcgtcatgggcaaaaacgagtgcatgcagggccttgaagttattgaatctacaaatttaaaatacttcacaaaagagatgacagccgaattttatgcactgaagggaatgttcttggctcagatcaacaagtccgaggaggcaaacaaagccttctctgcagctgtgcagatgcacgatgtgctggtgaaagcctgggccatgtggggcgactacctggagaacatctttgtgaaggagcggcagctgcacctgggcgtgtctgccatcacctgctacctgcacgcctgccggcatcagaacgagagcaaatcgaggaaatacttagccaaggtgctgtggcttttgagttttgatgatgacaaaaacactttggcagatgccgtcgacaagtactgcattggtgtgccacccatccagtggctggcctggatcccacagctgctcacctgcctggttggctcggagggaaagctgctcttgaacctcattagccaggttggacgcgtgtatccccaagcggtctactttcccatccggaccctgtacctgaccctgaaaatagaacagcgggaacgctacaagagcgatccagggcccataagagcaacagcacccatgtggcgctgcagccgaatcatgcacatgcagcgagagctccaccccacccttctgtcttccctggaaggcatcgtcgatcagatggtctggttcagagaaaattggcatgaagaggttctcaggcagctccaacagggcctggcgaaatgttactccgtggcgtttgagaaaagtggagcggtgtccgatgctaaaatcaccccccacactctcaattttgtgaagaagttggtgagcacgtttggggtgggcctggagaatgtgtccaacgtctcgaccatgttctccagcgcagcctctgagtctctggcccggcgggcgcaggccactgcacaagaccctgtctttcagaagctgaaaggccagttcacgacggattttgacttcagcgttccaggatccatgaagcttcataatcttatttctaagttgaaaaagtggatcaaaatcttggaggccaagaccaagcaactccccaaattcttcctcatagaggaaaagtgccggttcttgagcaatttctcggcacagacagctgaagtggaaattcctggggagtttctgatgccaaagccaacgcattattacatcaagattgcacggttcatgccccgggtagagattgtgcagaagcacaacaccgcagcccggcggctgtacatccggggacacaatggcaagatctacccatacctcgtcatgaacgacgcctgcctcacagagtcacggcgagaggagcgtgtgttgcagctgctgcgtctgctgaacccctgtttggagaagagaaaggagaccaccaagaggcacttgtttttcacagtgccccgggttgtggcagtttccccacagatgcgcctcgtggaggacaacccctcttcactttcccttgtggagatctacaagcagcgctgcgccaagaagggcatcgagcatgacaaccccatctcccgttactatgaccggctggctacggtgcaggcgcggggaacccaagccagccaccaggtcctccgcgacatcctcaaggaggttcagagtaacatggtgccgcgcagcatgctcaaggagtgggcgctgcacaccttccccaatgccacggactactggacgttccggaagatgttcaccatccagctggctctgataggcttcgcggaattcgtcctgcatttaaatagactcaaccccgagatgttacagatcgctcaggacactggcaaactgaatgttgcctactttcgatttgacataaacgacgcgactggagacctggatgccaaccgtcctgtcccatttcgactcacgcccaacatttctgagtttctgaccaccatcggggtctccggcccgttgacagcgtccatgattgcggtcgcccggtgcttcgcccagccaaactttaaggtggatggcattctgaaaacggttctccgggacgagatcattgcttggcacaaaaaaacacaagaggacacgtcctctcctctctcggccgccgggcagccagagaacatggacagccagcaactggtgtccctggttcagaaagccgtcaccgccatcatgacccgcctgcacaacctcgcccagttcgaaggcggggaaagcaaggtgaacaccctggtggccgcggcaaacagcctggacaatctgtgccgcatggaccccgcctggcacccctggctgtgactgtggccgccacggcacgcgggaatgtgaagggcgctccgggctctgagcccgcagcttttacgacttctccctgcgtcgttccttatattcacagaagccccatagtttcactgggttgcggttattttcctggtagtttgcgtgtaagaaagggagaatatagttttagaggaagctgaactatgacgatgctgggcgaacggtttgggaaatggcagagctgaaacttattccaagctttcaaaataatcttttaagaagccaggattctccggtctggaatttctgagtgagtcctttttttatggtgtcctccctctgtgaatgtacaggcggaactgtacgaacagctcccttccatccatttttaactctttcggaaataacacctcacagcagcttcgtgcttttgtacagacctttgtaacaagtgtacagaaaactcattttgtttgagaaacaggagttgatgaacccatcatgctggtttttctctgagcacaaagttttaggctgtacacagccagccttgggaatctcgttgagcgttcggcgtggatccacggggccaggccaccctgcgggaggccacacgcatccacttcggattcagtgggtgaagacagaactctgagagtctgcaggcggctcctgtgctttttatttctggctcttcggatgtcttctagacatttactatcactgcacctgaagaaaaaatcacttttaccttcctaatttaaaaagacaaaacagaaatgtacgttccttcgctagctttagtctttctgttcccatttttataaatctgagcattgataatgttctatctaaatttgtacagtgtgattttttttt

SEQ ID NO: 22918 - DNA, 2903 bp, Homo Sapiens
gtctcggccatgacacacatttgacatgccctccctcaacctacttatagactatttttcttgctctgcagcatggaccaaagagaaattctgcagaagttcctggatgaggcccaaagcaagaaaattactaaagaggagtttgccaatgaatttctgaagctgaaaaggcaatctaccaagtacaaggcagacaaaacctatcctacaactgtggctgagaagcccaagaatatcaagaaaaacagatataaggatattttgccctatgattatagccgggtagaactatccctgataacctctgatgaggattccagctacatcaatgccaacttcattaagggagtttatggacccaaggcttatattgccacccagggtcctttatctacaaccctcctggacttctggaggatgatttgggaatatagtgtccttatcattggtatggcatgcatggagtatgaaatgggaaagaaaaagtgtgagcgctactgggctgagccagtagagatgcagctggaatttggccctttctctgtatcctgtgaagctgaaaaaaggaaatctgattatataatcaggactctaaaagttaagttcaatagtgaaactcgaactatctaccagtttcattacaagaattggccagaccatgatgtaccttcatctatagaccctattcttgagctcatctgggatgtacgttgttaccaagaggatgacagtgttcccatatgcattcactgcagtgctggctgtggaaggactggtgttatttgtgctattgattatacatggatgttgctaaaagatgggataattcctgagaacttcagtgttttcagtttgatccgggaaatgcggacacagaggccttcattagttcaaacgcaggaacaatatgaactggtctacaatgctgtattagaactatttaagagacagatggatgttatcagagataaacattctggaacagagagtcaagcaaagcattgtattcctgagaaaaatcacactctccaagcagactcttattctcctaatttaccaaaaagtaccacaaaagcagcaaaaatgatgaaccaacaaaggacaaaaatggaaatcaaagaatcttcttcctttgactttaggacttctgaaataagtgcaaaagaagagctagttttgcaccctgctaaatcaagcacttcttttgactttctggagctaaattacagttttgacaaaaatgctgacacaaccatgaaatggcagacaaaggcatttccaatagttggggagcctcttcagaagcatcaaagtttggatttgggctctcctttgtttgagggatgttctaattctaaacctgtaaatgcagcaggaagatattttaattcaaaggtgccaataacacggaccaaatcaactccttttgaattgatacagcagagagaaaccaaggaggtggacagcaaggaaaacttttcttatttggaatctcaaccacatgattcttgttttgtagagatgcaggctcaaaaagtaatgcatgtttcttcagcagaactgaattattcactgccatatgactctaaacaccaaatacgtaatgcctctaatgtaaagcaccatgactctagtgctcttggtgtatattcttacatacctttagtggaaaatccttatttttcatcatggcctccaagtggtaccagttctaagatgtctcttgatttacctgagaagcaagatggaactgtttttccttcttctctgttgccaacatcctctacatccctcttctcttattacaattcacatgattctttatcactgaattctccaaccaatatttcctcactattgaaccaggagtcagctgtactagcaactgctccaaggatagatgatgaaatcccccctccacttcctgtatggacacctgaatcatttattgtggttgaggaagctggagaattctcaccaaatgttcccaaatccttatcctcagctgtgaaggtaaaaattggaacatcactggaatggggtggaacatctgaaccaaagaaatttgatgactctgtgatacttagaccaagcaagagtgtaaaactccgaagtcctaaatcagaactacatcaagatcgttcttctcccccacctcctctcccagaaagaactctagagtccttctttcttgccgatgaagattgtatgcaggcccaatctatagaaacatattctactagctatcctgacaccatggaaaattcaacatcttcaaaacagacactgaagacttctggaaaaagtttcacaaggagtaagagtttgaaaattttgcgaaacatgaaaaagagtatctgtaattcttgcccaccaaacaagcctgcagaatctgttcagtcaaataactccagctcatttctgaattttggttttgcaaaccgtttttcaaaacccaaaggaccaaggaatccaccaccaacttggaatatttaataaaactccagatttataataatatgggctgcaagtacacctgcaaataaaactactagaatactgctagttaaaataagtgctctatatgcataatatcaaatatgaagatatgctaatgtgttaatagcttttaaaagaaaagcaaaatgccaataagtgccagttttgcattttcatatcatttgcattgagttgaaaactgcaaataaaagtttgtcacttgagcttatgtacagaatgctatatgagaaacacttttagaatggatttatttttcatttttgccagttatttttattgtcttttacttttctacataaacataaacttcaaaaggtttgtaagatttggatctcaactaatttctacattgccagaatatactataaaaagttaaaaaaaaa

SEQ ID NO: 22919 - DNA, 726 bp, Homo Sapiens
gccttccttcctgcttcgcctccgcgcctcgcgctatgggacagagcccccgatccgccagcaccacctgaggatccagaaaccgccccagcgatggaagaggatcaggagctggagagaaaaatatctggattgaagacctcaatggctgaaggcgagaggaagacagccctggaaatggtccaggcagctggaacagatagacactgtgtgacatttgtattgcacgaggaagaccataccctaggaaattctctacgttacatgatcatgaagaacccggaagtggaattttgtggttacactacgacccatccttcagagagcaaaattaatttacgcattcagactcgaggtacccttccagctgttgagccatttcagagaggcctgaatgagctcatgaatgtctgccaacatgtgcttgacaagtttgaggccagcataaaggactataaggatcaaaaagcaagcagaaatgaatccacattctagtcctttatgcagtatacaaggagaactgtcctgtaggatattctcttcctgatggtgcagaacccagaattagaagtttgtggttacagcatactctgtccttcagaaaggcgtgattctagctgttgaccccttgcagctgttggaatctctgcaagaacctctgtattcttctaataaattccctcttttatttaaaaaaaaaaaaaaaaaaaaaaaaaaaaaaaaaaa

SEQ ID NO: 22920 - DNA, 2100 bp, Homo Sapiens
ccgcgggtcgggctctgtgtcagcagccgggcgggcgctcgggcgggacatggcagcctgtacagcccggcgggccctggccgtgggcagccgctggtggtcccggtcgctgactggggcccggtggccaaggccgctctgtgcggcggccggagctggagccttctcgccagcgtcgaccacgacgacgcggaggcacctctcgtcccgaaaccgaccagagggcaaagtgttggagacagttggtgtgtttgaggtgccaaaacagaatggaaaatatgagaccgggcagcttttccttcatagcatttttggctaccgaggtgtcgtcctgtttccctggcaggccagactgtatgaccgggatgtggcttctgcagctccagaaaaagcagagaaccctgctggccatggctccaaggaggtgaaaggcaaaactcacacttactatcaggtgctgattgatgctcgtgactgcccacatatatctcagagatctcagacagaagctgtgaccttcttggctaaccatgatgacagtcgggccctctatgccatcccaggcttggactatgtcagccatgaagacatcctcccctacacctccactgatcaggttcccatccaacatgaactctttgaaagatttcttctgtatgaccagacaaaagcacctccttttgtggctcgggagacgctaagggcctggcaagagaagaatcacccctggctggagctctccgatgttcatcgggaaacaactgagaacatacgtgtcactgtcatccccttctacatgggcatgagggaagcccagaattcccacgtgtactggtggcgctactgtatccgtttggagaaccttgacagtgatgtggtacagctccgggagcggcactggaggatattcagtctctctggcaccttggagacagtgcgaggccgaggggtagtgggcagggaaccagtgttatccaaggagcagcctgcgttccagtatagcagccacgtctcactgcaggcttccagtgggcacatgtggggcacgttccgctttgaaagacctgatggctcccactttgatgttcggattcctcccttctccctggaaagcaataaagatgagaagacaccaccctcaggccttcactggtaggccagctgaggccccaagtgcccaggcttggtcaccgggaagaacaactctcatcccacaattgctgcagaactcttctctccccatcatgggccacagtgggtctcttaatttgattgtggggttctttttgtggggaggggtggtataacttttcttcagaagacccatgtgggacacctccaaggctggcctcctcataagccctgcctacaccatgttccagtaaacctctccaccaaggaactgtgttcagctgccacaggcctggaggagtttcctggcctgtcacgtgaggtttgatcagtaaaccagtgcacgcttggccacccttgccatttctgctcccagagtctcaggctccccttctgacccagtgtgcgcccttgactgctttctttgctgcccttccagggagctgcccccctggtagggcatgtgcctgtttccctctcagcctggaggctggctggacatctcctagggtcactgtgcctctcagctagttggcgggggtgctggactggactcttgttcactttaccttctgccaaatgcagagagggaggccagtgtcagggtcggagtggcctggctcttagcactgaccgaccattgccatttctggcctcgctaggcccaggagaggagggaggcaagccagtcgggtttcctggagcaatgggtgtgccagccctcagcatgactctgccaagcatccagaccacaaatgcaggaatttggctgaggagcagctttaggtatggattgatgactaagtcaagctacttcctgagcttctctcagatttccaagagccagagatgaattgtgctgcatcttgccccaattcttaggatttcttttcctccgccactgcagtgattgttagaggtagttttcttgaattaatattaaatcacagttccagccctgtaaaaaaa

SEQ ID NO: 22921 - DNA, 1675 bp, Homo Sapiens
ctaagactcccacgaaactcaggttgaataattcatcaaattacacaactgaactcaagacatggctgcccagtgtgtcacaaaggtggcgctgaatgtttcctgtgccaatcttttggataaagatatagggtcaaagtcagaccctttatgtgtgttgtttttgaatacaagtggtcaacagtggtatgaggttgagcgcacagaaaggattaagaattgcttgaatccccaattttccaagacatttattattgattactactttgaagtggttcagaaattgaaatttggggtttatgacatcgacaacaaaactattgagctgagtgatgatgacttcttaggggaatgtgaatgtacccttggacaaattgtttccagcaagaagctaactcgaccactggtgatgaaaactggcagacctgcaggaaaagggagcattacgatttcagctgaagaaataaaagataatagagtggtcttgtttgaaatggaagccagaaaactggataataaggatctatttggaaagtcagacccatacctggaattccacaagcagacatctgatggaaactggctaatggttcatcggacagaggttgttaaaaacaacttgaatcctgtttggaggcctttcaagatctctcttaactcactgtgttacggagatatggacaaaaccattaaggtggagtgttatgattatgacaatgatgggtcacatgatctcattggaacatttcagaccaccatgacaaaactgaaagaagcctccagaagctcacctgttgaatttgaatgcataaatgagaaaaaaaggcaaaagaaaaaaagctacaagaattcaggtgttatcagtgtgaaacagtgtgagattacagtagaatgcacattccttgactatataatgggaggatgtcagctgaattttactgtgggagtggacttcactggctccaatggtgacccaaggtctccagactcccttcattacatcagccccaatggcgttaatgagtatttgactgctctctggtctgtgggactggtcattcaagattatgatgctgataagatgtttccagcttttggttttggcgctcagatacctcctcagtggcaggtatcacatgaatttccaatgaacttcaacccatccaatccctactgcaatggaatccaaggcattgtagaggcgtatcggtcttgtcttcctcagataaaactctatggaccaactaatttttctccaatcataaatcacgtggccaggtttgctgctgcagccacgcaacagcagacagcttctcaatattttgtgcttttgattattactgatggtgtgatcacagaccttgatgaaaccagacaagctatagttaatgcctccaggctgcctatgtccatcataattgttggagttggaggtgctgacttcagcgccatggagtttctggatggtgatggtggaagtctccgctccccattgggcgaagtggccatcagagatattgtccagtttgtgcctttcagacagttccagaatgctccaaaagaagcacttgctcagtgtgtcttggcagagattccccagcaggtggtgggctacttcaatacatacaaactccttcctcccaagaacccagccacgaaacaacagaagcagtga

SEQ ID NO: 22922 - DNA, 1664 bp, Homo Sapiens
ccttgtgatgcttttgcctgaaaccaagggtattgccttgccagagacagtggatgatgtagaaaaacttggcagtccacattcctgtaaatgtggcaggaataagaaaaccccagtttcccgctctcacctttgaggcccccgacaaagacagaaagaaggagctatccaggagctgatcctccttgcaaagctgtgccttgcagagatgcacgtgtgcatttcagctacatcatgccgcgctgttgtaatactgtataaagacctcaatctatccagagtatttttatataatgttggatgagttaggatttgtaatgctgttgaagtttctgggaacacataatatgtagccagtttaacaaagaagctgtcaggtgcacagcccttcctgggtttttttcttgtgttccctgtggtctctgacccattaggctaaagagagacaagagaagcccccaacctgattctcatgacagctccatcaagaatgtgggatgtgccgaccaaggatttgagaaagttgtacagaaatgtgttcatcaaatctggtcaagggactaagctcctagctgaccattcattctgaagattgcatggaggatgaacatctgggaatcctgttaatgagaaggctgaatcacaggcacctgggccaaagggtgtgagcattcatgttctctgctcaccttggtttccgcacaccttcgcaatgtgaacaggtcaggagtccctcccgtccacctcctctgtaacagctggggttccaggcatggtttaggccctgttccagcaataagaaccaatctgctgtacaatctgaggacttggctctgttatttacaaaatgatgctgtggttctgagattatttgggacatttttggctctcctttagtggacacctagagccacagattcccttctttactaaacaaatcccatggattctgatttctgggtcttaggattttaaaagtgaagggatatttttcttatatttgtgagttcagttccgatggtgcccgtggtcaaaagcgaaaaacatggacaattcctattcattcttagcactttgacatgtcttggggaaaagcttacattttaatttaaaagaaagatcaattatatccatgcttaacaggatcagcaggagctttataaatgactttacagagactaataagggatttgatctttctttttttgttatcgaggcttttgaaatgtggaacttgtgtgttctgctttatatgttatattcaatatcttttcagatgcagtctatattttatgctgagttttaaaaatgaaatactttatgcaaacaggcaaaattggtaccaaagggaaacattaaccatgaggaagagcatttttctaaggagaacaggtgacaatatacacatgtgcgctaatcgtaaaatgagcatcttagtctttaaaacacatcagaattgaatacgaataatctatttgtcgatgaaataaacacaactctttgaggatttgagactacattcaccctttattcacagtcacttgcagttttgcttttctctgcatttctctgctgtaagatgactgttgcattgttgaattgtattttgagtggatatttttgtttggtaacaattaaaattttaaatcgtaaaaaaaaaaaaa

SEQ ID NO: 22923 - DNA, 6266 bp, Homo Sapiens
cgttgtttggcgtgtttttttttttgttttttgtcactgcctgcctgggtcctgcccgaggtctccatcctcggtttccctgtccttgccccgggccctgggagtgctctggaaggctgcgcagtattggaggggacagaatgaccttccggccttgagtccctggggagcagatggaccctactggaagtcagttggattcagatttctctcagcaagatactccttgcctgataattgaagattctcagcctgaaagccaggttctagaggatgattctggttctcacttcagtatgctatctcgacaccttcctaatctccagacgcacaaagaaaatcctgtgttggatgttgtgtccaatcctgaacaaacagctggagaagaacgaggagacggtaatagtgggttcaatgaacatttgaaagaaaacaaggttgcagaccctgtggattcttctaacttggacacatgtggttccatcagtcaggtcattgagcagttacctcagccaaacaggacaagcagtgttctgggaatgtcagtggaatctgctcctgctgtggaggaagagaagggagaagagttggaacagaaggagaaagagaaggaagaagatacttcaggcaatactacacattcccttggtgctgaagatactgcctcatcacagttgggttttggggttctggaactctcccagagccaggatgttgaggaaaatactgtgccatatgaagtggacaaagagcagctacaatcagtaaccaccaactctggttataccaggctgtctgatgtggatgctaatactgcaattaagcatgaagaacagtccaacgaagatatccccatagcagaacagtccagcaaggacatccctgtgacagcacagcccagtaaggatgtacatgttgtaaaagagcaaaatccaccacctgcaaggtcagaggacatgccttttagccccaaagcatctgttgctgctatggaagcaaaagaacagttgtctgcacaagaacttatggaaagtggactgcagattcagaagtcaccagagcctgaggttttgtcaactcaggaagacttgtttgaccagagcaataaaacagtatcttctgatggttgctctactccttcaagggaggaaggtgggtgttctttggcttccactcctgccaccactctgcatctcctgcagctctctggtcagaggtcccttgttcaggacagtctttccacgaattcttcagatcttgttgctccttctcctgatgctttccgatctactccttttatcgttcctagcagtcccacagagcaagaagggagacaagataagccaatggacacgtcagtgttatctgaagaaggaggagagccttttcagaagaaacttcaaagtggtgaaccagtggagttagaaaacccccctctcctgcctgagtccactgtatcaccacaagcctcaacaccaatatctcagagcacaccagtcttccctcctgggtcacttcctatcccatcccagcctcagttttctcatgacatttttattccttccccaagtctggaagaacaatcaaatgatgggaagaaagatggagatatgcatagttcatctttgacagttgagtgttctaaaacttcagagattgaaccaaagaattcccctgaggatcttgggctatctttgacaggggattcttgcaagttgatgctttctacaagtgaatatagtcagtccccaaagatggagagcttgagttctcacagaattgatgaagatggagaaaacacacagattgaggatacggaacccatgtctccagttctcaattctaaatttgttcctgctgaaaatgatagtatcctgatgaatccagcacaggatggtgaagtacaactgagtcagaatgatgacaaaacaaagggagatgatacagacaccagggatgacattagtattttagccactggttgcaagggcagagaagaaacggtagcagaagatgtttgtattgatctcacttgtgattcggggagtcaggcagttccgtcaccagctactcgatctgaggcactttctagtgtgttagatcaggaggaagctatggaaattaaagaacaccatccagaggaggggtcttcagggtctgaggtggaagaaatccctgagacaccttgtgaaagtcaaggagaggaactcaaagaagaaaatatggagagtgttccgttgcacctttctctgactgaaactcagtcccaagggttgtgtcttcaaaaggaaatgccaaaaaaagaatgctcagaagctatggaagttgaaaccagtgtgattagtattgattcccctcaaaagttggcaatacttgaccaagaattggaacataaggaacaggaagcttgggaagaagctacttcagaggactccagtgttgtcattgtagatgtgaaagagccatctcccagagttgatgtttcttgtgaacctttggagggagtggagaagtgctcagattcccagtcatgggaggatattgctccagaaatagaaccatgtgctgagaatagattagacaccaaggaagaaaagagtgtagaatatgaaggagatctgaaatcagggactgcagaaacagaacctgtagagcaagattcttcacagccttccttacctttagtgagagcagatgatcctttaagacttgaccaggagttgcagcagccccaaactcaggagaaaacaagtaattcattaacagaagactcaaaaatggctaatgcaaagcagctaagctcagatgcagaggcccagaagctggggaagccctctgcccatgcctcacaaagcttctgtgaaagttctagtgaaaccccatttcatttcactttgcctaaagaaggtgatatcatcccaccattgactggtgcaaccccacctcttattgggcacctaaaattggagcccaagagacacagtactcctattggtattagcaactatccagaaagcaccatagcaaccagtgatgtcatgtctgaaagcatggtggagacccatgatcccatacttgggagtggaaaaggggattctggggctgccccagacgtggatgataaattatgtctaagaatgaaactggttagtcctgagactgaggcgagtgaagagtctttgcagttcaacctggaaaagcctgcaactggtgaaagaaaaaatggatctactgctgttgctgagtctgttgccagtccccagaagaccatgtctgtgttgagctgtatctgtgaagccaggcaagagaatgaggctcgaagtgaggatccccccaccacacccatcagggggaacttgctccactttccaagttctcaaggagaagaggagaaagaaaaattggagggtgaccatacaatcaggcagagtcaacagcctatgaagcccattagtcctgtcaaggaccctgtttctcctgcttcccagaagatggtcatacaagggccatccagtcctcaaggagaggcaatggtgacagatgtgctagaagaccagaaagaaggacggagtactaataaggaaaatcctagtaaggccttgattgaaaggcccagccaaaataacataggaatccaaaccatggagtgttccttgagggtcccagaaactgtttcagcagcaacccagactataaagaatgtgtgtgagcaggggaccagtacagtggaccagaactttggaaagcaagatgccacagttcagactgagagggggagtggtgagaaaccagtcagtgctcctggggatgatacagagtcgctccatagccagggagaagaagagtttgatatgcctcagcctccacatggccatgtcttacatcgtcacatgagaacaatccgggaagtacgcacacttgtcactcgtgtcattacagatgtgtattatgtggatggaacagaagtagaaagaaaagtaactgaggagactgaagagccaattgtagagtgtcaggagtgtgaaactgaagtttccccttcacagactgggggctcctcaggtgacctgggggatatcagctccttctcctccaaggcatccagcttacaccgcacatcaagtgggacaagtctctcagctatgcacagcagtggaagctcagggaaaggagccggaccactcagagggaaaaccagcgggacagaacccgcagattttgccttacccagctcccgaggaggcccaggaaaactgagtcctagaaaaggggtcagtcagacagggacgccagtgtgtgaggaggatggtgatgcaggccttggcatcagacagggagggaaggctccagtcacgcctcgtgggcgtgggcgaaggggccgcccaccttctcggaccactggaaccagagaaacagctgtgcctggccccttgggcatagaggacatttcacctaacttgtcaccagatgataaatccttcagccgtgtcgtgccccgagtgccagactccaccagacgaacagatgtgggtgctggtgctttgcgtcgtagtgactctccagaaattcctttccaggctgctgctggcccttctgatggcttagatgcctcctctccaggaaatagctttgtagggctccgtgttgtagccaagtggtcatccaatggctacttttactctgggaaaatcacacgagatgtcggagctgggaagtataaattgctctttgatgatgggtacgaatgtgatgtgttgggcaaagacattctgttatgtgaccccatcccgctggacactgaagtgacggccctctcggaggatgagtatttcagtgcaggagtggtgaaaggacataggaaggagtctggggaactgtactacagcattgaaaaagaaggccaaagaaagtggtataagcgaatggctgtcatcctgtccttggagcaaggaaacagactgagagagcagtatgggcttggcccctatgaagcagtaacacctcttacaaaggcagcagatatcagcttagacaatttggtggaagggaagcggaaacggcgcagtaacgtcagctccccagccacccctactgcctccagtagcagcagcacaacccctacccgaaagatcacagaaagtcctcgtgcctccatgggagttctctcaggcaaaagaaaacttatcacttctgaagaggaacggtcccctgccaagcgaggtcgcaagtctgccacagtaaaacctggtgcagtaggggcaggagagtttgtgagcccctgtgagagtggagacaacaccggtgaaccctctgccctggaagagcagagagggcctttgcctctcaacaagaccttgtttctgggctacgcatttctccttaccatggccacaaccagtgacaagttggccagccgctccaaactgccagatggtcctacaggaagcagtgaagaagaggaggaatttttggaaattcctcctttcaacaagcagtatacagaatcccagcttcgagcaggagctggctatatccttgaagatttcaatgaagcccagtgtaacacagcttaccagtgtcttctaattgcggatcagcattgtcgaacccggaagtacttcctgtgccttgccagtgggattccttgtgtgtctcatgtctgggtccatgatagttgccatgccaaccagctccagaactaccgtaattatctgttgccagctgggtacagccttgaggagcaaagaattctggactggcaaccccgtgaaaatcctttccagaatctgaaggtactcttggtatcagaccaacagcagaacttcctggagctctggtctgagatcctcatgactggtggtgcagcctctgtgaagcagcaccattcaagtgcccataacaaagatattgctttaggggtatttgatgtggtggtgacggacccctcatgcccagcctcggtgctgaagtgtgctgaagcattgcagctgcctgtggtgtcacaagagtgggtgatccagtgcctcattgttggggagagaattggattcaagcagcatccaaaatataaacacgattatgtttctcactaaagatacttggtcttactggttttattccctgctatcgtggagattgtgttttaaccaggttttaaatgtgtcttgtgtgtaactggattccttgcatggatcttgtatatagttttatttgctgaacttttatgataaaataaatgttgaatctctttggttgtagtaactggg

SEQ ID NO: 22924 - DNA, 2487 bp, Homo Sapiens
gttcccgccgtctccaccgccaccgcctcagccgcctcgcacatttagtcttgccgggagtggtgtgattcccgaccaagatggcggccgtggggcgagtcggctccttcggttcttctccgccgggattatcctcgacttacactggcggccccttgggcaacgagatagcgtcgggcaacggtggcgccgcggcaggcgacgacgaggacgggcagaacctttggtcctgcatcctcagcgaggtctccacccgctcgcgctccaagctccctgcggggaagaacgtgctactgctgggtgaagatggagctggaaaaacaagcttaataagaaaaattcagggaatagaggagtataagaaaggaagaggattggaatatttgtacttaaatgtgcatgatgaagacagggatgatcaaacaagatgtaatgtttggatcttagatggagacctatatcacaaaggcctccttaaattttcactggatgccgtatctctgaaggatactctagttatgctggttgttgacatgtcaaagccttggactgctttggattctttacagaaatgggcaagtgttgttagagaacatgttgacaaactgaaaatccctcctgaagaaatgaaacaaatggaacaaaagttgattagagacttccaagaatatgtagagccaggagaagacttcccggcttctccccagagaagaaatactgcgtcacaagaagacaaagatgacagtgtagttgtacctctgggtgcggatacacttacacataacttgggcattccagtactagtagtttgcacaaagtgtgatgccattagtgtattggagaaagaacatgactacagagatgaacattttgatttttttcagtcacatatccggaagttttgtttacggtatggtgcagcacttatttacacttcagtaaaagaaaacaaaaatatagacttagtatataaatacatcgttcagaaactatatggatttccctataagattcctgctgttgttgtggaaaaggatgcagtatttattccagcagggtgggataatgataagaaaataggaatattacatgaaaattttcaaacattaaaagcagaagataattttgaagacatcataactaaaccacctgttcgaaagtttgtacatgagaaggaaattatggcagaagatgatcaggtgtttcttatgaagctacagtcccttttagcaaagcaaccaccaactgcagctggaaggcctgtggatgcctcaccaagagtcccaggaggctccccacgaacaccaaatagatctgtatcatctaatgttgccagcgtgtcacccattcctgctgggtcaaaaaaaattgatccaaacatgaaagctggagctacaagtgaaggcgttctggcaaatttcttcaacagtttgttgagtaaaaagactggctctccaggaggccctggtgtgagtggtggtagccctgcaggtggggctggaggtggaagcagtggtttaccaccatccaccaaaaagtcaggccagaagcctgtcttagatgttcatgcagaactagacagaattacacgaaaaccagttacagtttctcccacaacacctacatctcctacggaaggagaagcttcttgaagataccaaataaagccatttattctgttttctgggataatgtaaacatgcctctgccttttccttcaaaagtgggaattagaaagctggagtgcttcttcagatggactaaatttatgtcgtgtgtgtgtgtgtgtgtgtgtgtggttacccattttttagaaggagccgtacagaagaaaaattattctacattatgtaggattgctgtttgcattgccattttgcataagaaagtaatttttgattttgaaaatctcaaaacttttagatctgaaatacagccatgtgatcgatcatattctaaaggctatttaaaacatgtaaaaggatttggggacggcagaaaacatgcagtttgggcattgactgacttggaagtctaagcttattttagttataactattaaaatcatttttaaaaatttgttagttttgctgacagagaaaaatcgtcagttgtcagattttgcacaccacaataaatgtaccaccacacacggaatatgctaagaaaactatcagatagcgtttgatacactagtcattgtctcaatcactgatcctgtaagttgtcatcaaaatatgatttagaaatattggccaaggtgttgctttaactgaggagaaaagaaagcacactgcctaaatgtgtaaaagaaaaatgcagaggttattaaaatgtaaagaagtaacaatctttggatttgtctatacatatatatatatatatcgctttgccttaatatacccccttttttgtttgtgactttcaactgtaatcagttaataaagtatttattctctgcattcaggttcaaaaaaaaaaaaaaaa

SEQ ID NO: 22925 - DNA, 2590 bp, Homo Sapiens
ggaattcggcacgaggcgagccgtgcggccagagcgggaaagagactcgtctttgcgtccgagttctggagccgccgcaccccgactcctggggccgcggcagcggctgcgaggggacgggcgtccgctgtctcctgggttcccctcgtagcgacccgcgggatcggaaaaaaaggagaagatggaggaggagggtggcagcagcggcggcgccgcggggaccagcgcggacggcggcgacggaggagagcagctcctcactgtcaagcacgagctgcggactgctaatttgacaggacatgctgagaaggtgggaatagaaaattttgagctcctgaaggtcctaggaactggagcttatggaaaagtatttctagttcgtaaaataagtggccatgatactggaaagctgtatgccatgaaagttttgaaaaaggcaacaatcgttcaaaaggccaaaaccacagagcatacaaggacagaacgacaagtcctggaacacattaggcagtcgccatttttggtaacattacattatgctttccagacagaaaccaaacttcatctcattttagattatataaatggtggtgaactttttactcatctttctcaaagagagcgtttcacagagcatgaggtgcagatttatgttggagaaattgtgcttgccctcgaacatctccacaagttggggattatatatcgtgatattaagcttgagaatattctacttgattctaatggccatgtggtgctgacagattttggtctgagtaaggagtttgtggctgatgaaactgaaagagcatattccttttgtggaactattgaatacatggcaccagatattgtcagagggggagattcaggacatgacaaggcagttgactggtggagtttgggtgttctaatgtatgaattactaactggagcatctcctttcactgttgatggagaaaaaaattcccaagctgagatatctaggagaatattaaaaagtgagcctccatatccccaagaaatgagtgctttagcgaaagacctaattcagcgtcttttgatgaaagatcccaagaagagattgggatgtggtccacgtgatgcagatgaaatcaaagaacatctcttctttcagaaaataaattgggatgatttagccgccaaaaaagtgcctgcaccatttaagccagtcattcgagatgaattagatgtgagtaactttgcagaagagttcacagaaatggatcccacttattctcccgcagccctgccccagagttctgagaagctgtttcagggctattcctttgttgctccttccatcctattcaagcgtaatgcagctgtcatagaccctcttcagtttcacatgggagttgaacgtcctggagtgacaaatgttgccaggagtgcaatgatgaaggactctccattctatcaacactatgacctagatttgaaggacaaacccctgggagaaggtagtttttcaatttgtcgaaagtgtgtgcataaaaaaagtaaccaagcttttgcagtcaaaataatcagcaaaaggatggaagccaatactcaaaaggaaataacagctctgaaactctgtgaaggacaccccaatattgtgaagttgcatgaagtttttcatgatcagcttcacacgtttctagtgatggaacttctgaatggaggagaactgtttgagcgcattaagaaaaagaagcacttcagtgagacggaagccagctacatcatgaggaagcttgtttcagctgtaagccacatgcatgatgttggagtggtgcacagggatctgaaacctgagaatttattgttcaccgatgaaaatgacaatttggaaattaaaataattgattttggatttgcacggctaaagccaccggataatcagcccctgaagactccatgcttcacccttcattatgccgccccagagctcttgaatcagaacggctacgatgagtcctgtgacctgtggagcttgggcgtcattttgtacacaatgttgtcaggacaggttcccttccaatctcatgaccgaagtttgacgtgtaccagcgcggtggaaatcatgaagaaaattaaaaagggagatttctcctttgaaggagaagcctggaagaatgtatcccaagaggctaaagatttgatccaaggacttctcacagtagatccaaacaaaaggcttaaaatgtctggcttgaggtacaatgaatggctacaagatggaagtcagctgtcctccaatcctctgatgactccggatattctaggatcttccggagctgccgtgcatacctgtgtgaaagcaaccttccacgcctttaacaaatacaagagagaggggttttgccttcagaatgttgataaggcccctttggctaagagaagaaaaatgaaaaagactagcaccagtaccgagacgcgcagcagttccagtgagagttcccattcttcttcctctcattctcacggtaaaactacacccaccaagacactgcagcccagcaatcctgccgacagcaataacccggagaccctcttccagttctcggactcagtagcttag

SEQ ID NO: 22926 - DNA, 2236 bp, Homo Sapiens
ggggactcaaggctggcctggctcaagtgaacagcacgtccaggaggcgacctcgtccgcgggtttgcattctggggtggacgagctgggggttcggtccgagcccggtgggaggctcccggagcgcagcctgggcccagcccaccccgcgccggcggccatggcaggcaccctggacctggacaagggctgcacggtggaggagctgctccgcgggtgcatcgaagccttcgatgactccgggaaggtgcgggacccgcagctggtgcgcatgttcctcatgatgcacccctggtacatcccctcctctcagctggcggccaagctgctccacatctaccaacaatcccggaaggacaactccaattccctgcaggtgaaaacgtgccacctggtcaggtactggatctccgccttcccagcggagtttgacttgaacccggagttggctgagcagatcaaggagctgaaggctctgctagaccaagaagggaaccgacggcacagcagcctaatcgacatagacagcgtccctacctacaagtggaagcggcaggtgactcagcggaaccctgtgggacagaaaaagcgcaagatgtccctgttgtttgaccacctggagcccatggagctggcggagcatctcacctacttggagtatcgctccttctgcaagatcctgtttcaggactatcacagtttcgtgactcatggctgcactgtggacaaccccgtcctggagcggttcatctccctcttcaacagcgtctcacagtgggtgcagctcatgatcctcagcaaacccacagccccgcagcgggccctggtcatcacacactttgtccacgtggcggagaagctgctacagctgcagaacttcaacacgctgatggcagtggtcgggggcctgagccacagctccatctcccgcctcaaggagacccacagccacgttagccctgagaccatcaagctctgggagggtctcacggaactagtgacggcgacaggcaactatggcaactaccggcgtcggctggcagcctgtgtgggcttccgcttcccgatcctgggtgtgcacctcaaggacctggtggccctgcagctggcactgcctgactggctggacccagcccggacccggctcaacggggccaagatgaagcagctctttagcatcctggaggagctggccatggtgaccagcctgcggccaccagtacaggccaaccccgacctgctgagcctgctcacggtgtctctggatcagtatcagacggaggatgagctgtaccagctgtccctgcagcgggagccgcgctccaagtcttcgccaaccagccccacgagttgcaccccaccaccccggcccccggtattggaggagtggacctcggctgccaaacccaagctggatcaggccctcgtggtggagcacatcgagaagatggtggagtctgtgttccggaactttgacgtcgatggggatggccacatctcacaggaagaattccagatcatccgtgggaacttcccttacctcagcgcctttggggacctcgaccagaaccaggatggctgcatcagcagggaggagatggtttcctatttcctgcgctccagctctgtgttgggggggcgcatgggcttcgtacacaacttccaggagagcaactccttgcgccccgtcgcctgccgccactgcaaagccctgatcctgggcatctacaagcagggcctcaaatgccgagcctgtggagtgaactgccacaagcagtgcaaggatcgcctgtcagttgagtgtcggcgcagggcccagagtgtgagcctggaggggtctgcaccctcaccctcacccatgcacagccaccatcaccgcgccttcagcttctctctgccccgccctggcaggcgaggctccaggcctccagagatccgtgaggaggaggtacagacggtggaggatggggtgtttgacatccacttgtaatagatgctgtggttggatcaaggactcattcctgccttggagaaaatacttcaaccagagcagggagcctgggggtgtcggggcaggaggctggggatgggggtgggatatgagggtggcatgcagctgagggcagggccagggctggtgtccctaaggttgtacagactcttgtgaatatttgtattttccagatggaataaaaaggcccgtgtaattaaccttcaaaaaaaaaaaaaaaaaaaa

SEQ ID NO: 22927 - DNA, 2961 bp, Homo Sapiens
gtcaggtggaggatccctttccctcccgccctgcttttgctaggggaggggggtgccctgagcctgagtcgcagccagcctgggagctgggccatgttggccgcagatggccccctggtgaaggttcccgttggctttgggaagtagacaacgggtctgcctcacggggctgaggtgggactggaggatttcgagggcagaactctgggaaggaaagaaaggcttaggacccaaccagcattccccctggcactgcgggggcctggccagctcatggcgttccctgagcctgttccccaactgtgaaagggggtgatgatcttcacctcccggcatcctgagcggccaagcaggttgggggcgcctgccccccactaggccaagtggagggggtccctccgtccaatgggcctggccagggccctacgccgcctcagcggcgccctggattcgggagacagccgggcgggcgatgaagaggaggccgggcccgggttgtgccgcaacgggtgggcgccggcaccggtgcagtcacccgtgggccggcgccgcggtcgcttcgtcaagaaagacgggcactgcaacgtgcgtttcgtaaacctgggtggccagggcgcgcgctacctgagcgacctgttcaccacatgcgtggacgtgcgctggcgctggatgtgcctgctcttctcctgctccttcctcgcctcctggctgctcttcggcctggccttctggctcattgcctcgctgcacggcgacctggccgccccgccaccgcccgcgccctgcttctcacacgtggccagcttcctggccgccttcctcttcgcgctggagacgcagacgtccatcggctacggcgtgcgcagcgtcaccgaggagtgcccggccgctgtggccgccgtggtgctgcagtgcattgccggctgcgtgctcgacgccttcgtcgtgggtgctgtcatggccaagatggccaaacccaagaagcgcaacgagacgctggtcttcagcgagaacgccgtcgtggcgctgcgcgaccaccgcctctgcctcatgtggcgcgtcggcaacctgcgccgcagccacctggtcgaggcccacgtgcgtgcccagctgctgcagccccgtgtgaccccagagggtgagtacatcccgctggaccaccaggatgtggatgtgggctttgatggaggcaccgatcgtatcttcctcgtgtcccccatcaccatcgtccatgagatcgactctgccagtcctctgtatgagctaggacgtgccgagctggccagggctgactttgagctggtggtcattctcgaggggatggttgaggccacagccatgaccacacagtgtcgctcgtcctacctccctggtgaactgctctggggccatcgttttgagccagttctcttccagcgtggctcccagtatgaggtcgactatcgccacttccatcgcacttatgaggtcccagggacaccggtctgcagtgctaaggagctggatgaacgggcagagcaggcttcccacagcctcaagtctagtttccccggctctctgactgcattttgttatgagaatgaacttgctctgagctgctgccaggaggaagatgaggacgatgagactgaggaagggaatggggtggaaacagaagatggggctgctagcccccgagttctcacaccaaccctggcgctgaccctgcctccatgatgcaaactgatgtccccttccccgtgtatgcccccttccccaaggtagcaagatggagggatggggctctctcctgggatgggggcaggtgttcctgaataccgacaggcctgctgggtaaatgactaggtggtaaggttctgccatgcctggtgacccaccatggacatactggaccttaattcctctgcttctgtgctccctcctgagaaccctttatgagcctgattcctcagtctcaccagaattctggatcacccaagaggaaaagactggcagttctagattcctctatatggggagacctggattgttgaccagggtgagaagccaatggtatagactgcctctggggaagcaagttggcagttcttgaacagcatcagatatcaagagtttgtaggtctggattcacctaagattcaagggagtgttgcttctcaactcagccaactgagtagcaaatcatttgttctagaccacctaaggagggaaggttatggaatgccccaagtattcaagatcatcttgattgaccaaagaccaaaaaaaaaaaaaagacctgtggttccagaaagctcattagttgagattctgtgagtctaggttgaccacagaggcaagcactggtgagtctaggacagattttacgtggagagttgaactactccagaaactaaagagtaatgtttctagaatgcacaaaacattattagtctgtgggtttagaaagactgaagtgacagattaagagttcttgatattagataactccaacttctggctgtagagcacccagccaagagaataagcagtgctttgaaaggatccactgggtgggttgtttttttttaaagtgccattctagaatgtccaaagggaatcaggattctgtggctgtagactgatcacagagtcaaggaagcagtggcaattctagatatctgagattttgctggttccagtttgcccaatggagttgagaatctcaatgattctagatgacttcttgtggttctgtaatgccaaaaggaatgaaggctccagggatacagagttgtccattaccaaagcctggaagttctcatcacctccaggtggactgcttggcagtgctaggaggtggactcaggacttcagaagcaacatttctggcctgacctggaaggtgaaggtgaaggtgagaccctgtagggcacagggctaattagtggacaagggaagggggaggcccaggctcgtgcc

SEQ ID NO: 22928 - DNA, 3334 bp, Homo Sapiens
gcacgagccccgggctgccggcgcgggcgccgcggcacgtccacaggctgggtcgcgaggtggcgatcgctgagaggcaggagggccgaggcgggcctgggaggcggcccggaggtggggcgccgctggggccggcccgcacgggcttcatctgagggcgcacggcccgcgaccgagcgtgcggactggcctcccaagcgtggggcgacaagctgccggagctgcaatgggccgcggctggggattcttgtttggcctcctgggcgccgtgtggctgctcagctcgggccacggagaggagcagcccccggagacagcggcacagaggtgcttctgccaggttagtggttacttggatgattgtacctgtgatgttgaaaccattgatagatttaataactacaggcttttcccaagactacaaaaacttcttgaaagtgactactttaggtattacaaggtaaacctgaagaggccgtgtcctttctggaatgacatcagccagtgtggaagaagggactgtgctgtcaaaccatgtcaatctgatgaagttcctgatggaattaaatctgcgagctacaagtattctgaagaagccaataatctcattgaagaatgtgaacaagctgaacgacttggagcagtggatgaatctctgagtgaggaaacacagaaggctgttcttcagtggaccaagcatgatgattcttcagataacttctgtgaagctgatgacattcagtcccctgaagctgaatatgtagatttgcttcttaatcctgagcgctacactggttacaagggaccagatgcttggaaaatatggaatgtcatctacgaagaaaactgttttaagccacagacaattaaaagacctttaaatcctttggcttctggtcaagggacaagtgaagagaacactttttacagttggctagaaggtctctgtgtagaaaaaagagcattctacagacttatatctggcctacatgcaagcattaatgtgcatttgagtgcaagatatcttttacaagagacctggttagaaaagaaatggggacacaacattacagaatttcaacagcgatttgatggaattttgactgaaggagaaggtccaagaaggcttaagaacttgtattttctctacttaatagaactaagggctttatccaaagtgttaccattcttcgagcgcccagattttcaactctttactggaaataaaattcaggatgaggaaaacaaaatgttacttctggaaatacttcatgaaatcaagtcatttcctttgcattttgatgagaattcattttttgctggggataaaaaagaagcacacaaactaaaggaggactttcgactgcattttagaaatatttcaagaattatggattgtgttggttgttttaaatgtcgtctgtggggaaagcttcagactcagggtttgggcactgctctgaagatcttattttctgagaaattgatagcaaatatgccagaaagtggacctagttatgaattccatctaaccagacaagaaatagtatcattattcaacgcatttggaagaatttctacaagtgtgaaagaattagaaaacttcaggaacttgttacagaatattcattaaagaaaacaagctgatatgtgcctgtttctggacaatggaggcgaaagagtggaatttcattcaaaggcataatagcaatgacagtcttaagccaaacattttatataaagttgcttttgtaaaggagaattatattgttttaagtaaacacatttttaaaaattgtgttaagtctatgtataatactactgtgagtaaaagtaatactttaataatgtggtacaaattttaaagtttaatattgaataaaaggaggattatcaaattcatatatgataaaagtgaatgttctaagtctctcaaactagcgttttatgtaataatatgtaatataaataaaactatggtaaatgtgacaagcatttaataggaaaatgctaaggaggcctcataaatgacccataattaccaacgtagaatttttcagtacatttagggttgctggatttagcaaataaaaataaagattgcccagttagatttgaatttcagataaacaattagttttttaatattttacatggaatatttggaaaatacttatactaaaaaattatttgtttgaaattcacatttaactgggagtcttgtattttatctggcaatcctaaaatacattggtatgaaacaaatcacttttagaagtatattgctattttgattgggttgtttttgtgtgtagaaacgtacaataacaactcaaaggcacaggagatttctaaacattgtgaaaagttgaatagattatatatttattctcataatactttcactaatactaaataaaatttggggaacactttttatttttatataatttccaatttacagaaaagtttcaaaaatagtacaaagagctctcttacccagattcactaattgttcatacgtgctttatctttcatgctttctctgtacacacacacacacacacaaatttttcctcaatcatttgaaagtcagttataggcatcatgccccttaaaccctaaatacttcagtgtgtaatactgaataattactaaaaatgattttctcagaaaaaaaaactcccacaattctggaactataatactgtaagccttagaataaataatactttcaagttccaatctaaagttctttttgagttttgttgcccgttttatgcttgatgtgtatagtaatagggtaggctatttattttattaaaattttttttagagacaaggttttgctgtgttgcccaagctggaacttgaacgactgggctgaagtgatcttcccacctcagcctcccaagtagctgggaatacaggtgtctgccaccatacccagtttcatttttgttttttatacccgaagttcatttcctttgtctccctaaaactgaactgtaattttgggaggttttcattagtggaagctcttcatttataaagctatttgaaggggtttaggaatttatatcacatggtaattgtagagaaaaagaagctatatacctcaaaatcgtgccctctttacatatgtcttatcaggtataacatgttgaaatgtcacattagtagtaaagtggggtttatttatatagtggttaagaaatgtcagtttacactgctgtatacttcttcttctgtgtccctaaggcctggtacagtgccaagcacatacttggtatccaataaatatttgttggatgaaaaaaaaaaaaaaaaaaaa

SEQ ID NO: 22929 - DNA, 8901 bp, Homo Sapiens
cacttactacagatgggtgctaatgtccacgctcgtgatgatggaggtctcatcccgcttcataatgcctgttcttttggccatgctgaggttgtgagtctgttattgtgccaaggagctgatccaaatgccagggataactggaactatacacctctgcatgaagctgctattaaagggaagatcgatgtgtgcattgtgctgctgcagcacggagctgacccaaacattcggaacactgatgggaaatcagccctggacctggcagatccttcagcaaaagctgtccttacaggtgaatacaagaaagacgaactcctagaagctgctaggagtggtaatgaagaaaaactaatggctttactgactcctctaaatgtgaattgccatgcaagtgatgggcgaaagtcgactcctttacatctagcagcgggctacaacagagttcgaatagttcagcttcttcttcagcatggtgctgatgttcatgcaaaagacaaaggtggacttgtgcctcttcataatgcatgttcatatggacattatgaagtcacagaactgctactaaagcatggagcttgtgttaatgccatggatctctggcagtttactccactgcacgaggctgcttccaagaaccgtgtagaagtctgctctttgttacttagccatggcgctgatcctacgttagtcaactgccatggcaaaagtgctgtggatatggctccaactccggagcttagggagagattgacttatgaatttaaaggtcattctttactacaagcagccagagaagcagacttagctaaagttaaaaaaacactcgctctggaaatcattaatttcaaacaaccgcagtctcatgaaacagcactgcactgtgctgtggcctctctgcatcccaaacgtaaacaagtgacagaattgttacttagaaaaggagcaaatgttaatgaaaaaaataaagatttcatgactcccctgcatgttgcagccgaaagagcccataatgatgtcatggaagttctgcataagcatggcgccaagatgaatgcactggacacccttggtcagactgctttgcatagagccgccctagcaggccacctgcagacctgccgcctcctgctgagttacggctctgacccctccatcatctccttacaaggcttcacagcagcacagatgggcaatgaagcagtgcagcagattctgagtgagagtacacctatacgtacttctgatgttgattatcgactcttagaggcatctaaagctggagacttggaaactgtgaagcaactttgcagctctcaaaatgtgaattgtagagacttagagggccggcattccacgcccttacacttcgcagcaggctacaaccgcgtgtctgttgtagagtacctgctacaccacggtgccgatgtccatgccaaagacaagggtggcttggtgccccttcataatgcctgttcatatggacactatgaggtggctgagcttttagtaaggcatggggcttctgtcaatgtggcggacttatggaaatttacccctctccatgaagcagcagctaaaggaaagtatgaaatctgcaagctccttttaaaacatggagcagatccaactaaaaagaacagagatggaaatacacctttggatttggtaaaggaaggagacacagatattcaggacttactgaaaggggatgctgctttgttggatgctgccaagaagggctgcctggcaagagtgcagaagctctgtaccccagagaatatcaactgcagagacacccagggcagaaattcaacccctctgcacctggcagcaggctataataacctggaagtagctgaatatcttctagagcatggagctgatgttaatgcccaggacaagggtggtttaattcctcttcataatgcggcatcttatgggcatgttgacatagcggctttattgataaaatacaacacgtgtgtaaatgcaacagataagtgggcgtttactcccctccatgaagcagcccagaaaggaaggacgcagctgtgcgccctcctcctagcgcatggtgcagaccccaccatgaagaaccaggaaggccagacgcctctggatctggcaacagctgacgatatcagagctttgctgatagatgccatgcccccagaggccttacctacctgttttaaacctcaggctactgtagtgagtgcctctctgatctcaccagcatccaccccctcctgcctctcggctgccagcagcatagacaacctcactggccctttagcagagttggccgtaggaggagcctccaatgcaggggatggcgccgcgggaacagaaaggaaggaaggagaagttgctggtcttgacatgaatatcagccaatttctaaaaagccttggccttgaacaccttcgggatatctttgaaacagaacagattacactagatgtgttggctgatatgggtcatgaagagttgaaagaaataggcatcaatgcatatgggcaccgccacaaattaatcaaaggagtagaaagactcttaggtggacaacaaggcaccaatccttatttgacttttcactgtgttaatcagggaacgattttgctggatcttgctccagaagataaagaatatcagtcagtggaagaagagatgcaaagtactattcgagaacacagagatggtggtaatgctggcggcatcttcaacagatacaatgtcattcgaattcaaaaagttgtcaacaagaagttgagggagcggttctgccaccgacagaaggaagtgtctgaggagaatcacaaccatcacaatgagcgcatgttgtttcatggttctcctttcattaatgccattattcataaagggtttgatgagcgacatgcatacataggaggaatgtttggggccgggatttattttgctgaaaactcctcaaaaagcaaccaatatgtttatggaattggaggaggaacaggctgccctacacacaaggacaggtcatgctatatatgtcacagacaaatgctcttctgtagagtgacccttgggaaatcctttctgcagtttagcaccatgaaaatggcccacgcgcctccagggcaccactcagtcattggtagaccgagcgtcaatgggctggcatatgctgaatatgtcatctacagaggagaacaggcatacccagagtatcttatcacttaccagatcatgaagccagaagccccttcccagaccgcaacagccgcagagcagaagacctagtgaatgcctgctggtgaaggccagatcagatttcaacctgggactggattacagaggattgtttctaataacaacatcaatattctagaagtccctgacagcctagaaataagctgtttgtcttctataaagcattgctatagtgatgaatagtatgagtaactgatacatactcaactgctactgttccctttgaggaaatgtttacaggggcggccttttaacatatctcaggctcattttcattgcaattatccatttctaaaacaagattgcttcgatctagacttggaaatggaaaataagaaaaccaatgctttttcaaatgttcacaattcacacactacatttgttttgttatgcatgacgtgtctataacaaatatacacatacgacaggcaacaagcttgtttttgatttgccagacatgcatcattggctattgtttgtttgttttttgtttttttgtgttttttgggttactttgaaaatgagccagagccttcttgaggatattttgcacaaagtcacgctgacaaaatcattagcagtgcaacccaagcttctggctgagcaagattcagtttccactttttaaaatttttttattttgctctgtagctgcacttctcgttatcataaattgagatgaaaaggaaaaaacatcaagttttagtacctttttatgaattggcctatcttacaagagaagggcacaaacaccaacctgacttaggaacgcctaaattcagagaagtcaaagccggtgaaggccacttgctctttccaacacaagcctgccacagaggtcttcgggacagtactggagatgcaggttgacacgggcttgagttccaaggtgaaaaaactggggaggctgtgaaggaagagctgcattaaggagggtgaggagcgtgtggttctgtatcatggcagccccaatggatccaggggatgcctccaaaaaatacatgcttcccttcccttaatctgtactgttgggattgttacccctccaaattagctgccttatttcaaaagtcagtgaaattactgcacttgatgagggtcacaaaaataccacttgattgtttctttagttgagaatgctgggattcagactcgaatagtggatagatacacacaaatgcaaggacttttttgtttactccagatttggggtttattttgagtggcatgcttcaaatagttcataaagatccttgcattaaatttctgaaccatttcttcaaacttcttagtgtgtttagacaaggagaacaaaaattgaaaccaaagccctttctgttattttttcaatgaaggtgagaaagaaataccatacaattttctttgtgaaattactgtttattttcatcaacatttaccaagtgccattgacatttataaaaaaaatgatcctttatagttcttacacttgcccttttcaccttaactgaatatgaattgagtgcactaacttatttacttgatatactgtgcatctactctgctttgaagcgaaagaaatataaacacgaggaggaataggaaagacagtgtgacacaaacttgccattgcaattcaaagccctgaaaacgatgggtttaatgcaaggtgattaagctgtgacctcctttaatctcctgaagcaaaataaaatggttacatgcaaaacttctagaaatacactcttaaaatatatacattttgctttgattttggcttcaacccagtgctggaactaggcatccagactagtttgaatgtttgtagctgaatttttatgggtcctcaaaattaaatcgagaattagcctcagttgttgcttcttttgaagtttcagtgacccaagctgggtgtttgtgtcttggctacttgtttaatagcactagaattccaggtgaagctttgagagttgatattcattaagagggctttttttccccttctttccttctcttttgctgtaacaaagggttgaagaaattgccatctgtgtagttttcagtagctgtcaagtgtgtcttacttaccttcccccagacgtagtttaaaatggtaaacacagctgtgatttttagttaagtaaaagagttaatatgatatagatatggaaagctttatggcttcattaaaaagataaaccactacctaactgtggttgtatgttgtttccatcatactaactagatgaatggatgcgccagttttcatcttggtccttacacttgagaagttaaactgtggttcagtatttaaactgccagtgttatacgtctcatgctctgtgtgccaggtgaaggtactgtgtaaggaagacatttgcggtgcttcttgtcctataatgattcaagtatatagtagttcttgaaagagtgtgcatatattactcatctgcttaagagagtgggttaatggatatatcagaggagccaaatacatttttttcagaacttgaaaaccaaaggtcatcatgagtgcactcaaaagttaggacaagtttattacatttgggattttcatctgtagccgtatgaagaaccctttccaatataaaagcatggcattaaattaggctgaagtcttttattttttgtatatgtactatatagaaatactagcaagttaggatcatccaatatggcctaccccgaaatggcccctctgtttccctaaccacatggaagaaagaatctgaacgtctccaccggctctacccgagttccaaaactaaagggcttctccagacctgatggttccagtttacctgctgttggcctgctggatacttgactcaggcataaattaagtgccctggtcccgaactttctcccagtatttgacctccttccctctttcctaaattactagtctggaattaaaattagctccagcaatgacctttgactccattcattttctcctcatcttgggtcttaaaaaaggagaccagatacctcctagcttttgtatcacaaccaggaatgggtattaggcctcatgcgctttgctcagaacactgccgctttgttaacaaatgacagcatggaacccagagttttgattcgatgcaaaataacagcagtgcaaccaggattcttgttttccttttccttcttggagtttggaatttctagcttttcaagcagcataagtagaatcaacattaggatgttttcatgaaatagcatccttatacttctttgagcttgatgttagtggctagactgatttccctttgctctcaaaatacaaagtgcattgaagtatacagagaaatgcctgaatatggcaagcaaataatgtagattaacattctattattgtatccgttttacaaaaaataaaattttgatatatgccggagaacggcattagaatgcaataagttgtctaggtttttctgtttcagtgtctctcccaatggcacgaagggttattgggcattgtccccacccccgcctttttaacatgtgcactatctggattcctgtaaatggccttgcaaacagaagtggtgtgtattttcaagcacctttcccccattgtatccgaatccctcttgtgtgatatctgtgacaaataccattcttcttgtgttttctgttgggactaattgtctcacgtaaagctatagaccttactaatttggcaggtattcaaaactgccattaagataggatttcatgtcagatacgtatttaaagagtaaagtcaaatttgtttaatgtcagatcagtgacagaagtgaaaagaaagtaattgtgaaagtgatgtttgagctattgtacacatctagcatatggaaagcaaatgcactcgaaaactactattctagaacatgaggcttcttcagcaacttgtgcactctgccattaataaattaaatttttcccctctagaaagccttaactatggcggaaactttttaaccttttatattttaataaataaaacattgtagtcccatttcttagtgtttgaaaggtgtgtcagtgagtcggccatgtctccatgtgtttcagacctgttcatcttattttatgatggtatatttcataagtaatattcccttacatgcaatggagctgattaaaattaatccatttcaatttctccatattggaacttcctcagctaccagatttctggtttggagaagtgctggaaagatttcaaagcctattcagttgtgtatgtggggatacgacagcaactgtgataccttgtagaatatgagtgatatgcaagctgtgttttttaattgttttaaaatgtaaattatggttatgctaaagtgaaaacctagaggaagctaatgattttatatactttgcacgaccaaatatggtcgtagtatgacgagttttatacattgccagagagttctgcctcctctgaaataacattcgcactgtagattgcatttcggcttttcctcctttcacattcttttttgctttacacttcacgtcttcgcacctgccctacctcccatcctttcaaagaggtttctttcacgttccagaattcagattgttctgtgatttcttttacatcagtctacccatttctgcaggcagccctgaaagcccttgtgttgattcagagtgtttgcagagaaatgcagttgaaccctggtagtggggtgtccctcacacacccgcgcacccctcccaaagttcaggatgaaaggctagaaaacccattcaaagttaggaaagaacacagatctttgaggccgatagcctagacctagaagatgaccttgagtatgtaaacattgtctccgtgacacaaaacactgaaactcttcatgtgcatataacacctgcttctgctcccattgtttcaagctcatcttatctttgtagtagtaatgtttgtctttgatacctacaaactaaaaaggtacttttatcaaggtttctcaaaacatttacaaaaccagctttgagaaaatgttatgttgcctggcaacagcactcggagtagtaattgtgttttctcattgtgatgttggtctgtgtgagcaaccagtgtagtgactctttggttcattattcgtgttgtttttatttttagtctctgtgtgacccaacagtggcaggggttacaaccccctctcctttcttttttgtatttatctatttgtaggattgtcagatcaagtacaagatgcccagttaagtttgaatttcagagaaacaatttcacgttaagaatgtttcatgcaatatttggcatatatttacagtaaaagcattcattatttgtctgaaattcaaatttaactgagcatgctggtttttctcattgtttggtttttctaaatctggcaatcctacagctgtggtcatgggaaatcacctacagcatgttaaagtcctctagtcatcatctcgtcacctgaaatggaagtcctttttccctcaccctccacttctttccaaaggagggcatcaaggaacttaacctgcctgcctggtgggtttctatttaagacatctttgtgattatatttaacctgcaattgtgctttggcttaatgtctagctcactgtacttgtaaatgattaatattcaataaaaccatttttaaagtaaaaaaa

SEQ ID NO: 22930 - DNA, 3772 bp, Homo Sapiens
ccgtcccggggcggacgggcgcgggcgggaggatggagctgaactccctgctgatcctgctggaggcggccgagtacctggagcgcagggatcgagaggccgagcacggctacgcctcggtgctgcccttcgacggcgacttcgccagggagaaaacaaaggcggccggcctggtgcgcaaggccccgaacaacaggtcttcacacaacgagctagaaaagcacagacgagccaaactcaggctgtaccttgagcagctcaagcaactggtgcccctgggccccgacagcacccgccacaccacgctgagcctcctgaagcgggccaaggtgcacatcaagaaactggaggagcaggaccgccgggcactgagcatcaaggagcagctgcagcaggagcatcgtttcctgaagcggcgcctggagcagctgtcggtgcagagcgtggagcgcgtgcgcacagatagcacgggctctgctgtctccacggacgactcagagcaagaagtggacatagagggcatggagtttggccctggtgagctggacagtgttggcagcagcagtgacgcggacgaccactacagcctgcagagtggcaccggcggcgacagtggcttcgggccccactgccggcggctgggccgccccgccctctcgtaggcccgtgccctctgctccttggcctgcctgcccgccagccacgcgtgtcagccctccagttctccttcagttgacgccagcctctccacaggcccactgctgtgccattctggaagctccagctgctgctgggctgcctggcactgcccgcttgccggtcagggcctgccgagctgcctgccccttccagctgggcagagtcccctgcaaggaggcagggcccagcttccacatccggagccctggtcagcatagccgcccacggtctgttctcagattcctaatcattccagaagtattaaacgtcattgctgcaaacctcggcaggtgccgtgtgaggggcttaatgaccaccacagggagctcagaccccaaccctggatcccaggagaaaggagtggaccgaggaaggaaggaaggcaaggctgtctgtccatccgtccgtctgtccacctacctgtcagtccacataggctcctggcgtggacaaggggtctgtgaagggcgggaactgggtgagcacctggggcaggtgggtggttaaggtccttcccacttcgcaggtgtcagaacctagggctgggctctcggggccaggcaggccagcccagcccacgccgagctgggcagcgtctgctctggtaggactgtcagacgcacacgcgcacgcacctagacacacccactcatgtacatgctcacacatgcagacacacctgggcgtcccgaggtcacatgttctggggatgatggccttcagggggtcatctggcaaacagcccctgggctgtgcctggatccccctctagctcctgctcacccacgcccacccagtagtcctgcctgtctgcacaggagaggggcttctcttcctggctggggctggggtgaactggaggctggttaagttgcagccgctgggtcctcgggggcttactcatctcccttttttaaacaaaaagcaaaaaagtaaaatgctgcactgcccagcagcccggttagggctcctggagccaccttaggaaagggcttctcatgagctctgctgcggcagcttcagctggcagagaggctttcccagaaaaaaaaaaaaaaccatttttaaaaagaagaaagcctaaagactctcggcctagggacgtccgtgtgtgccgcctctgtttcctgtaccagatttttgtattctattttcctagctgttgttgcgtccttgtttgctgaggggtgggagccacccagcgtctcagggacctgtccctccgtcacgtcgtcaaagtgtgccttgtgtcttgtgtcaggccttgcccttcccaccagcatgtccctcgtggctcagggtgccccaggcctgcccagctagtgctgtcctcccatctcctgtgggcagcccctcccggcagccagggcttcctggaggcgatgcagccaggcccctgtgggtggcacggaggggctgtgacctggtccccagtgttgccctccccagtggctggcaggggcctgcttgctcactagagagatggattctcacctgtcacctgactcgagccccctgcttcctggcctaggcgagggttccaggtttcagacactgcagccaatgaagactgtgctcgctggtggtgcaggcctggcaccaggaggcttgcacccgcctttccttcctgacgtcctctgtccttggggctggcccatagcagtgcctgccgtgcctctggtacatctgtagccaattcccatatcatggggaaaattcgtgtctattttcagtcgtacgcatagacgccccaggatggggggcccactgtggcggaagggggtccctggaaacaactctggcacagaacctgccctgcaggctgtagggggcatggtgcctggagctgaggggcatccgaacgcgttgcgggtggttgtgaggaggcctgtctgcatctccttccggccccactggggtccaggggtgcccagaaaggagcttcccctgcctgcctgagtctgtccccccaggcttcatttcaaacaccgtggcacctccgagcaaggcgggccgtgtgtaaaagcttgcttccccagccagcactgcagggccctgaggtggtcgtgtccctgccctcaattcttgaagcaccagctccctgccccaccctccagtgcctgggcagctaggggcttctgctctcatctctgaccagcagaatccacccggtgaccagtggtggcccctcagcccaccctcccggcagctcagcctgtggctcttgaggccgtggttcccacgtggactgggaggcagtctcagccacccggggtgctgtttcagctgcccctccctgccatcagcaggtgggtgaggggttgcccactgggtgggggcccgtgctaggagtcaccacatgctccaacctcccactgctcccctgtcaggggcccaggctgccatcactggaggctgcagggaccaagaggccatcaccgtgtctatagagagcagacagaagcagaacagagcccggggctcctgagcctctgcgtgtgccctcccagcccacaccagtgctctcggccactgagcacccagactcaggcttgggttccccagccttattggaaggcagctcccgcataccaggataacccccgcaaaccacatagcagacccccgccatcctcgcagagtgggagaggctgcagcaaggctttgcctctgcagaccccatcttagtggcacggtgcttgggcctgtgtccccgggtggtggaaccctgtaccggtctgtggccctagggtccctgctctgtctgccccggcccgtgctgtccgctgggtgaggcaggctcccccgtgccctgcctccctctgtcagggaacctgggaccccctccccactgcctgcacagaggaccctgaccctcggccagcagggtggccccaggtccatgttgggcactagggcaggttccgtgccagagtcgggggccacacgagggcctggtgccggtgaggggggcgtgcgctagagggggaaaggggcccccggccacctgtccaccgtgtgggccgtgctgttccttatgtcattgtaatataaatacagatttttatatctc

SEQ ID NO: 22931 - DNA, 1869 bp, Homo Sapiens
ggcgccgggggcgggggtgggaggcggaggcggggccggggcgccgcgggcggggcgccgggggcggggcgagtccggaggactcctcggactgcgcggaacatggcgttctggggttggcgcgccgcggcagccctccggctgtggggccgggtagttgaacgggtcgaggccgggggaggcgtggggccgtttcaggcctgcggctgtcggctggtgcttggcggcagggacgatgtgagtgcggggctgagaggcagccatggggcccgcggtgagcccttggacccggcgcgccccttgcagaggcctcccagacccgaggtgcccagggcattccggaggcagccgagggcagcagctcccagtttcttcttttcgagtattaaaggtggaagaaggtccatatctttttctgtgggtgcttcaagtgttgttggaagtggaggcagcagtgacaaggggaagctttccctgcaggatgtagctgagctgattcgggccagagcctgccagagggtggtggtcatggtgggggccggcatcagcacacccagtggcattccagacttcagatcgccggggagtggcctgtacagcaacctccagcagtacgatctcccgtaccccgaggccatttttgaactcccattcttctttcacaaccccaagccctttttcactttggccaaggagctgtaccctggaaactacaagcccaacgtcactcactactttctccggctgcttcatgacaaggggctgcttctgcggctctacacgcagaacatcgatgggcttgagagagtgtcgggcatccctgcctcaaagctggttgaagctcatggaacctttgcctctgccacctgcacagtctgccaaagacccttcccaggggaggacattcgggctgacgtgatggcagacagggttccccgctgcccggtctgcaccggcgttgtgaagcccgacattgtgttctttggggagccgctgccccagaggttcttgctgcatgtggttgatttccccatggcagatctgctgctcatccttgggacctccctggaggtggagccttttgccagcttgaccgaggccgtgcggagctcagttccccgactgctcatcaaccgggacttggtggggcccttggcttggcatcctcgcagcagggacgtggcccagctgggggacgtggttcacggcgtggaaagcctagtggagcttctgggctggacagaagagatgcgggaccttgtgcagcgggaaactgggaagcttgatggaccagacaaataggatgatggctgcccccacacaataaatggtaacataggagacatccacatcccaattctgacaagacctcatgcctgaagacagcttgggcaggtgaaaccagaatatgtgaactgagtggacacccgaggctgccactggaatgtcttctcaggccatgagctgcagtgactggtagggctgtgtttacagtcagggccaccccgtcacatatacaaaggagctgcctgcctgtttgctgtgttgaactcttcactctgctgaagctcctaatggaaaaagctttcttctgactgtgaccctcttgaactgaatcagaccaactggaatcccagaccgagtctgctttctgtgcctagttgaacggcaagctcggcatctgttggttacaagatccagacttgggccgagcggtccccagccctcttcatgttccgaagtgtagtcttgaggccctggtgccgcacttctagcatgttggtctcctttagtggggctatttttaatgagagaaaatctgttctttccagcatgaaatacatttagtctcctcaaaaaaaaaaaaca

SEQ ID NO: 22932 - DNA, 1174 bp, Homo Sapiens
gtccgtagagctgtgagagaatgaagatgagctttgcgttgactttcaggtcagcaaaaggccgttggatcgcaaaccccagccagccgtgctcgaaagcctccattgggttatttgtgccagcaagtcctcctctggaccctgagaaggtcaaagagttacagcgcttcatcaccctttccaagagactccttgtgatgactggggcaggaatctccaccgaatcggggataccagactacaggtcagaaaaagtggggctttatgcccgcactgaccgcaggcccatccagcatggtgattttgtccggagtgccccaatccgccagcggtactgggcgagaaacttcgtaggctggcctcaattctcctcccaccagcctaaccctgcacactgggctttgagcacctgggagaaactcggaaagctgtactggttggtgacccaaaatgtggatgctttgcacaccaaggcggggagtcggcgcctgacagagctccacggatgcatggacagggtcctgtgcttggattgtggggaacagactccccggggggtgctgcaagagcgtttccaagtcctgaaccccacctggagtgctgaggcccatggcctggctcctgatggtgacgtctttctctcagaggagcaagtccggagctttcaggtcccaacctgcgttcaatgtggaggccatctgaaaccagatgtcgttttcttcggggacacagtgaaccctgacaaggttgattttgtgcacaagcgtgtaaaagaagccgactccctcttggtggtgggatcatccttgcaggtatactctggttacaggtttatcctcactgcctgggagaagaagctcccgattgcaatactgaacattgggcccacacggtcggatgacttggcgtgtctgaaactgaattctcgttgtggagagttgctgcctttgatagacccatgctgaccacagcctgatattccagaacctggaacagggactttcacttgaatcttgctgctaaatgtaaatgccttctcaaatgacagattccagttcccattcaacagagtagggtgcactgacaaagtatagaaggttctaggtatcttaatgtgtggatattcttaattaaaactcattttttttaaataaaaaattgttcagctttaaaa

SEQ ID NO: 22933 - DNA, 3850 bp, Homo Sapiens
ctcgtggaggctgagattgcttcacctgtggtatcagacatcacaacatggggctcaccaagcagtacctacgctatgttgctagtgcggtctttggcgttatcggcagccaaaaaggtaatattgtctttgtgacacttcgtggtgagaaaggacgttatgtggcagtaccagcttgtgaacacgttttcatctgggacttaaggaaaggagagaagattcttatccttcaggggcttaaacaagaagttacttgcttatgcccctccccagatgggctacacttagctgttgggtatgaggatgggtcgatccgaatcttcagtctcctgagtggggaaggaaatgtgaccttcaatggtcacaaagcagctatcactaccttgaagtatgatcagctaggaggcagactggcatctgggtccaaggacacagatattattgtatgggatgtgatcaatgaaagtggtctgtaccgtctaaaggggcacaaggatgccatcacacaagcattgtttctacgagaaaagaacctgctagttactagtgggaaagataccatggtgaaatggtgggaccttgatactcagcactgctttaaaacaatggttggccaccggactgaggtatgggggttggttctgttgtcagaagaaaagcgactcatcactggggcctcagacagtgaactgagggtatgggacatagcttatctgcaagagattgaagacccggaagaaccagaccccaagaaaatcaaaggatcttctcctggaatacaagatactcttgaggcagaggatggtgcctttgagacggatgaagcccctgaggatcgaatcctttcatgcagaaaagctggttccataatgcgggaaggaagagacagagttgtaaaccttgcagtcgacaagacaggcaggattcttgcttgccatggaactgactctgtgctagaattgttttgtatcctttccaaaaaggaaattcagaagaaaatggataagaagatgaagaaagctagaaagaaagcaaaattacattctagcaaaggagaggaggaagatcctgaggttaatgttgaaatgagtctgcaagatgaaatccagcgggtgactaatataaaaacttctgccaaaatcaagtcctttgacttgattcattcacctcacggagagttaaaggctgtcttcctgctgcagaacaacctggtggaattgtattcactgaatccatccttgcctactcctcagcctgtcaggacaagcagaatcactattgggggtcatcgcagtgatgtgcggactttgtcattcagctcagacaatattgctgttctttcagctgcagctgattccattaaaatatggaacaggtctacactgcagtgtattcgcacaatgacctgtgaatatgcactttgctcattctttgtacctggtgatagacaggtagtcataggaacaaagacagggaagctgcagctttatgacttggcttcagggaatctgctggagacaatagatgcacatgatggagctttatggtccatgtccctctctccagatcagcgtggctttgtgacaggtggtgcagataaatctgtcaaattctgggattttgagttagtgaaagatgaaaatagtacccaaaagagactttctgtgaagcaaacccgaactttgcaactagatgaagatgttctgtgtgtcagttactctcccaatcaaaagctattggctgtgtctttgctggactgtactgtgaaaattttctacgttgatactttaaagttttttctgtcactgtatggacacaaactgcctgttatatgcatggacatctctcatgatggagcactcatagcaactggctccgctgataggaatgtgaaaatctggggtttggactttggggactgccacaagtctctctttgcacatgatgacagtgtgatgtacctacagtttgtacccaagtctcacctcttcttcactgccggaaaagatcataagattaaacagtgggatgcagacaaatttgaacacatacagactctggagggtcatcaccaggaaatatggtgtttggctgtaagccccagtggagactatgttgtatcatcgtcccatgacaaatctctgagactttgggagagaacaagggagcctcttattcttgaggaagaaagggagatggaaagagaagcagaatatgaggagagtgtggccaaagaagaccaaccagcagttccaggagagactcaaggtgacagttactttactggaaagaaaactattgaaacagtgaaagcagctgagaggattatggaggctattgagttgtaccgagaagaaactgcaaaaatgaaggaacacaaagccatttgtaaagctgcagggaaagaggttccacttcccagcaaccccatcctaatggcttatggcagtatctcaccttcagcttatgtattagagatttttaaagggatcaagtcgagtgagctggaagaatctctacttgtgctgcctttctcttatgtcccagacattcttaaactctttaacgaattcattcagctgggctctgatgttgaacttatatgccggtgcctcttcttcctccttaggattcactttggacagatcactagcaatcaaatgcttgtgccagtgatagaaaaattaagggaaacaactatttcaaaagtcagccaagtccgggatgttatcggcttcaatatggctggtcttgattatctcaagagggaatgcgaggcaaaaagtgaagttatgttttttgctgatgctactagccacttggaagagaagaagaggaagaggaaaaagagggagaagttgattctaacgttgacttagaactgaaatgtggtatcttttttttttcaactttttcctttaaaggactcctaaactaagcacagaagagttggcgtcatcttaaaaataccaaataacagaagatcgcattgcagatgatatcaggatgtggtttccagctttgcctgatggaattccaacatgagattatgggctgggctccatttcttggacttaaaatgcattattagtttaaaaactttctgtgctctcaaagcttgagccttgcagctcaagcttgttgttccctttatattctagcagggaataaataattgttttaattaggtatttgtttcattggagttgaaattaacatttcaaaagtttttcgtatttttttatggcagatgatttgtcatttatttatattaggttttactgcctattgagacaaccaggtgcataattgattgccctttggccataaaaatgcagtgtcatggatcttagagctaaaaaggactgtaaaaattacccagaacagcgtcctcagacttaaccttctgcaagttatgtctgtatataagaagattctaattgctaactgtttatacttttctgaataaaatagttgtttctaattaaaaagtagccaagctaagatgcctggctgggcttctgaggaattaatacacttcgtgtgtgtgtgtgtgtgtgtgtgtgtgtgtgtgtgtatgtgtatgtacacatacatatatatagttgacacttgaaaaatgcaggtggtaggggcactgacccacccctacgccccgcacagtcaaaaatctgcatataacttttgattccccaaagtcttaagtactagtagcctgttattgactgggagcctgactgatgtattatatatattgtatactgtattcttaaagtaagctagagaaaagaaaatgttacttagaaaatcataaggaagagaaaatatatttactgtgtttatcaatact

SEQ ID NO: 22934 - DNA, 1567 bp, Homo Sapiens
cactgtctgccctgtctacacggctgtgacaaaagtgccacaagcctgaagcaagacgccgatgacatgtgcatgatatgtttcaccgaagcgctctcggcagcaccagccattcagctggattgtagtcacatattccacttacagtgctgtcggcgagtattagaaaatcgatggcttggcccaaggataacatttggatttatatcttgtcccatttgcaagaacaaaattaatcacatagtactaaaagacctacttgatccaataaaagaactctatgaggatgtcagaagaaaagccttaatgagattggaatatgaaggtctgcataagagtgaagctatcacaactcctggtgtgaggttttataatgacccagctggctatgcaatgaatagatatgcatattatgtgtgctacaaatgcagaaaggcatattttggtggtgaagctcgctgcgatgctgaggctggacggggagatgattatgatcccagagagctcatttgtggtgcctgttctgatgtttccagggctcagatgtgtcccaaacatggcacagactttttggaatataaatgtcgctactgctgttcagtggctgtttttttctgttttggaacaacacatttttgtaatgcttgtcatgatgattttcaaagaatgactagcattcctaaggaagaactaccacactgtcctgcaggtcccaaaggcaagcagttagaaggaactgaatgtccactccatgttgttcatccacccactggggaagagtttgctctgggatgtggagtgtgcgaaatgcccacactttttagaacacgcagatcctttgtctacagagagaaaaattgccttcatcccccaagaggatgcggtgaagtttaaactctgctcaggataaggacgggaccatttttacatccatgaaaatgaaccattcacagtgcaagaaggataccaaataccatgtacataattcttgctatgaaaagtttccccattattttggtttatcttcttttgaacaaatgacatcaaacttgtgaggtgtttgcatgtggccattaccgtcattggcctgtgaagcattggacatttatagataattgatataaaagaatcgccatgcccatggactaagaacgatgctggctttcaagcaaaaaagaaaaataatcattgtttattgtatactgcctttttgtaatcctgtacaattgcatcacgggtggggataaaaagaggaatattctggtttatttcctagactgttatttaaaaaaaaaaaaaaacattgtgttagggacagcatataaatggtaataagtatcacactgtatataaacatatcaatgtttgtccgtataagaattactaaattacaaatgcaatttcatttaaacttctaggttaagtttgagcctgaaattttaatgaagtgcaatactgagtgtgcctcattatcttgcagctgtaaacatattggaatgtacatgtcaataaaaccactgtacatttttatacagtgataaagtataaaaaaaaaaaaaaaaaaaaa

SEQ ID NO: 22935 - DNA, 1929 bp, Homo Sapiens
tagctggctgagaggggactgggcgccggcggggaaggaggagcgctaggtcggtgtacgaccgagattagggtgcgtgccagctccgggaggccgcggtgaggggccgggcccaagctgccgacccgagccgatcgtcagggtcgccagcgcctcagctctgtggaggagcagcagtagtcggagggtgcaggatattagaaatggctactccccagtcaattttcatctttgcaatctgcattttaatgataacagaattaattctggcctcaaaaagctactatgatatcttaggtgtgccaaaatcggcatcagagcgccaaatcaagaaggcctttcacaagttggccatgaagtaccaccctgacaaaaataagagcccggatgctgaagcaaaattcagagagattgcagaagcatatgaaacactctcagatgctaatagacgaaaagagtatgatacacttggacacagtgcttttactagtggtaaaggacaaagaggtagtggaagttcttttgagcagtcatttaacttcaattttgatgacttatttaaagactttggcttttttggtcaaaaccaaaacactggatccaagaagcgttttgaaaatcatttccagacacgccaggatggtggttccagtagacaaaggcatcatttccaagaattttcttttggaggtggattatttgatgacatgtttgaagatatggagaaaatgttttcttttagtggttttgactctaccaatcagcatacagtacagactgaaaatagatttcatggatctagcaagcactgcaggactgtcactcaacgaagaggaaatatggttactacatacactgactgttcaggacagtagttcttattctattctcactaaatccaactggttgactcttcctcattatctttgatgctaaacaattttctgtgaactattttgacaagtgcatgatttcactttaaacaatttgatatagctattaaatatatttaagggtttttttttttttgacaaattcaacattcaacgagtagacaaaatgctaattatttccctgattaggaaagtttctttaaaaaacacgtaattttgcctagtgctttttctctacctgcccttgggctcactaatatcaccagtattattaccaagaaaatattgagtttacctgattaaactttaaaagttaattgtagatttaaattgtgtgaacctaatgatttttgcagtgaaacctttactaattcaaagttgcatgttctatgacatctgtgacttgcgttgcagagtgtacatgaaactgtataattgagtcattcagtaaaggagaacagtatcttggttaattgctactgaaaggttgagaaaggaatggtttgatatttaccacagcgctgtgcctttctacagtagaactggggtaaaggaaatggttttattgcccatagtcatttaggctggaaaaaagttgaaaacttaacgaaatattgccaagagattgttatgtgtttggttccagcctaaaaatgattttgtagtgttgaaatcatagctacttacatagctttttcatatttctttcttagttgttggcactcttaggtcttagtatggatttatgtgtttgtgtgtgtgtagtttatcctctctctcatctttatctagagattgactgatacctcattctgtttgtaaaaccagccagtaatttctgtgcaaccttactatgtgcaatatttttaaatcctgagaaatgtgtgcttttgttttcggatagacttatttctttagttctgcacttttccacattatactccatatgagtattaatcctatggatacatattaaaacaagtgtctcatacaacattgtatgtgagagaaatataaatatttacaacctgaaaaa

SEQ ID NO: 22936 - DNA, 3893 bp, Homo Sapiens
cacttttatacttcccttcgtttgcatgtgttacttcttcagcctaggtctttccccttccgttcgttcttcaaaacccaggcaaaacacctcttcctctgagcagccttctcagaacttttctcccatgtggccagaggaaggagagacttctgtctatctcttctgctagaccccgaactctttggaggcagaggttatccacaagaggcttggcaaatgtttctcagtcatagttggactgtttgaaaaattaaaggttctatttgtccgtcagtttcatccgtgacatttaactttttataccaaagtcttagaatctaccatcattttttgggccattgataccactttaaccacagttaatttcagcttttggcaggaaagagaggaaacatcctgtgatgtttcagcactgcatttttttccccatctcattcaggagaatgaagtttctagattagaagacataatgcagcatttaaaatcaaagaagcgggaagaaaggtggatgagagcatccaagcggcagtcggagaaagaaatggaagaactgcatcataatattgatgatcttttgcaagagaagaaaagcttagagtgtgaagtagaagaattacatagaactgtccagaaacgtcaacggcaaaaggacttcattgatggaaatgtagagagtcttatgactgaactagaaatagaaaaatcactcaaacatcatgaagatattgtagatgaaattgagtgcattgagaagactcttctgaaacgtcgctcagagctcagggaagctgaccgactcctggcagaggctgagagtgaactttcatgcactaaagaaaagacaaaaaatgctgttgaaaagttcactgatgccaagagaagtttattgcaaactgagtcagatgctgaggaattagaaaggagagctcaggaaactgctgttaacctcgtcaaagctgatcagcagctaagatcgctccaggctgatgcaaaggatttggagcagcacaaaatcaagcaagaagaaatcttgaaagaaataaacaaaattgtagcagcaaaagactcagacttccaatgtttaagcaagaagaaggaaaaactgacagaagagcttcagaaactacagaaagacatagagatggcagaacgcaatgaggatcaccacctgcaggtccttaaagaatctgaggtgcttcttcaggccaaaagagccgagctggaaaagctgaaaagccaggtgacaagtcagcagcaggagatggctgtcttggacaggcagttagggcataaaaaggaggagctgcatctactccaaggaagcatggtccaggcaaaagctgacctccaggaagctctgagactgggagagactgaagtaactgagaagtgcaatcacattagggaagtaaaatctcttctggaagaactgagttttcagaaaggagaactaaatgttcagattagtgaaagaaaaactcaacttacacttataaagcaggaaattgaaaaagaggaagaaaatcttcaggttgttttaaggcagatgtctaaacataaaaccgaactacagaatattctggacatgttgcaacttgaaaaccatgagctacaaggtttgaagctacaacatgaccaaagggtatctgaattagagaagactcaggtggcagtgctagaggagaaactggagttagagaatttgcagcagatatcccagcagcagaaaggggaaatagagtggcagaagcagctccttgagagggataaacgagaaatagaacgaatgactgctgagtcccgagctttacaatcgtgtgttgagtgtttgagcaaagaaaaggaagatctccaagagaaatgtgacatttgggaaaaaaagttggcacaaaccaaaagggttttagcagcagcagaagaaaatagcaaaatggagcaatcaaacttagaaaagttggatttgaatgtcagaaaactgcagcaggaactagaccaactaaacagagacaagttgtcactgcataacgacatttcagcaatgcaacagcagctccaagaaaaacgagaagcagtaaactcactgcaggaggaactagctaatgtccaagaccatttgaacctagcaaaacaggacctgcttcacaccaccaagcatcaggatgtgttgctcagtgagcagacccgactccagaaggacatcagtgaatgggcaaataggtttgaagactgtcagaaagaagaggagacaaaacaacaacaacttcaagtgcttcagaatgagattgaagaaaacaagctcaaactagtccaacaagaaatgatgtttcagagactccagaaagagagagaaagtgaagaaagcaaattagaaaccagtaaagtgacactgaaggagcaacagcaccagctggaaaaggaattaacagaccagaaaagcaaactggaccaagtgctctcaaaggtgctggcagctgaagagcgtgttaggactctgcaggaagaggagaggtggtgtgagagcctggagaagacactctcccaaactaaacggcagctttcagaaagggagcagcaattggtggagaaatcaggtgagctgttggccctccagaaagaggcagattctatgagggcagacttcagccttctgcggaaccagttcttgacagaaagaaagaaagctgagaagcaggtggccagcctgaaggaagcacttaagatccagcggagccagctggagaaaaaccttcttgagcaaaaacaggagaacagctgcatacaaaaggaaatggcaacaattgaactggtagcccaggacaaccatgagcgggccaggcgcctgatgaaggagctcaaccagatgcagtatgagtacacggagctcaagaaacagatggcaaaccaaaaagatttggagagaagacaaatggaaatcagtgatgcaatgaggacacttaaatctgaggtgaaggatgaaatcagaaccagcttgaagaatcttaatcagtttcttccagaactaccagcagatctagaagctattttggaaagaaacgaaaacctagaaggagaattggaaagcttgaaagagaaccttccatttaccatgaatgagggaccttttgaagaaaaactgaacttttcccaagttcacataatggatgaacactggcgtggagaagcactccgggagaaactgcgtcaccgggaagaccgactcaaggcccaactccgacactgtatgtccaagcaagcagaagtattaattaaaggaaagcggcagacagagggcactttacacagtttgaggagacaagtagatgctttaggggaattggtcaccagcacctctgcagattcagcgtcatcacccagtctgtctcagctggagtcttccctcacagaggactctcaacttggacaaaatcaggaaaagaatgcctcagccagatgaggaatactgtcttgtgtaaatatattcaaggaaaacacctccactacctcactgacttcataattggaatgtcacatggtttttttttaatcaagatgcagtgaactgagattctgaaactccactgtagtttactttgcctgtaccattaatgccaatgtttttataaatcacttgtacatagtacatatgggaatagttgcatatgggaatttaaaccaacatgtggctgagccttttttctttaatcttcgtaacatgtttaaaaaaaaaacagtgattttaactgcatatttgaacctacaaactggtaaatcttattaacaaaaagaatgtacgtaaggccctctttccttatagtgtcgagttatttttgaattttgcttaaaatctattttttcatatgaaaataaaagataacaatcaaaaaataaac

SEQ ID NO: 22937 - DNA, 5172 bp, Homo Sapiens
tggtcttgaactcctgaccttgtgatccgctcgcctcagcctcccaaagtgctgggattacaggcatgagccaccgtgcctgtcctagaaccactggtaactcttaactgagacaagatttcgccatgttgcccaggctggtctcgaacttctgagctcaagcgatctacctgcctcgtcctcccaaagtgttggaattgcaggtgtgagccactgcacccggcccttgcctcatgtttgaatgataatttacctgggcataaaattctggacacttgtggtggcacgagctgtctgcttttctgtggagactgcgggttgcagacaccagcagccccctattgctgcacgtcaggtgtcctccacctcagtactgtggacatctcgggccgcatagccctgttgcgcgggcatcctgtgcgttgcaggagatgcagcagcatccatgaccgcaacccatcagagtgttctaagaacggaagcatctgggctggatggaatttagcatcaagcagagtcccctttctgttcagagtgttgtaaagtgcataaagatgaagcaggcaccagaaatcctcggcagtgccaacgggaagactccgagctgcgaggtgaaccgcgagtgttctgtgttcctcagcaaagcccagctctccagtagcctgcaggagggggtcatgcagaagtttaacggccacgacgccctgccctttattccagccgacaagctgaaagatcttacttcccgggtgtttaatggagaacccggcgcacacgatgccaaactgcgttttgagtcccaggaaatgaaagggattgggacaccccctaacactacccctatcaaaaatggctctccagaaattaagctgaaaatcaccaaaacatacatgaatgggaagcctctctttgaatcttccatttgtggtgacagtgctgctgatgtgtctcagtcagaagaaaatggacaaaaaccagaaaacaaggcgagaaggaacaggaagaggagcataaaatatgactccttgctggagcagggccttgtcgaagcagctcttgtgtctaagatctcaagtccttcagataaaaagattccagctaagaaagagtcttgtccaaacactggaagagacaaagaccacctgttgaaatacaacgttggtgatttggtgtggtccaaagtgtcgggttacccttggtggccttgcatggtttctgcagatccactccttcacagctataccaaacttaaaggtcagaaaaagagtgcacgccagtatcacgtacagttctttggtgacgccccagaaagagcttggatatttgagaagagcctcgtagcttttgaaggagaaggacagtttgaaaaattatgccaggaaagtgccaagcaggcacccacgaaagctgagaaaattaagctattgaaaccaatttcagggaaattgagggcccagtgggaaatgggcattgttcaagcagaagaagctgcaagcatgtcagtggaggagcggaaagccaagttcacctttctctatgtgggggaccagcttcatctcaaccctcaagtagccaaggaggctggcattgctgcagagtctttgggagaaatggcagaatcctcaggagtcagtgaagaagctgctgaaaaccccaagtctgtgagagaagagtgcattcccatgaagagaaggcggagggccaaactgtgtagctctgcagagaccctggagagtcaccccgacatagggaagagtactcctcaaaagacggcagaggctgaccccagaagaggagtagggtctcctcctgggaggaagaagaccacagtctccatgccacgaagcaggaagggagatgcagcatcccagtttttggtcttctgtcaaaaacacagggatgaggtggtagctgagcacccagatgcttcaggtgaggagattgaagagctgctcaggtcacagtggagtctgctgagtgagaagcagagagcacgctacaacaccaagtttgccctggtggcccctgtccaggctgaagaagactctggtaatgtaaatgggaaaaaaagaaaccacacaaagaggatacaggaccctacagaagatgctgaagctgaggacacacccaggaaaagactcaggacggacaagcacagtcttcggaagagagacacaatcactgacaaaacggccagaacaagctcttacaaggccatggaggcagcctcctcgctcaagagccaggcagcaacgaaaaatctgtctgatgcatgtaaaccactgaagaagcgaaatcgggcttccacggcagcatcttcagctcttgggtttagcaaaagttcatctccttctgcatccttaactgagaatgaggtaaaataataataataacgataaccatggcattggtatgaaggccatttagctgcccacgctgcagtgtgagtaatgctcagacttcataagcgcagcattggtgctcactgccagtgcagatgttttagggcctcttggctaactcagattcatgaaatggacaaacagtgcactatgttagtttatttgagcactttttatacacacgcacacagtgtctgtgtacatgtacagatatacttcagtcttgatgcagtttcatagttcttaaaatctgtctgaagaatgttgtgttctgtgtagccctcacactgtaagagttcacatggaagtaagtctgcgttggttctgaaagggcacagtgtcagttgagctgacatatactgggtggggtggaaggcgactcacacaccacacctgattcctgttgcttccagacctaggctcatggaggaagccaaagatttctttgttctcatgcatttcatggctttggtcctttaaattctggcacatttttagttacttgagtgttgaggtgagtcagaactaccattgtaatatgactcctgtgttctggacttgcagagtacatgatagcaaaataaagccatttggggctgctgcctgccatcattgtaacatgacacttagactttattatcaaacctaaattttttgccgttgccaaaaacaacaaatagccacagaacgtaggtgtgacacttttttgttcggaggtagttttggtttcctgatttttagggattaccttcatagagctttggagttttaatttcttgttatttggttctccgtgatgctgtttttctcattgtagacatgggtcctgtttttgtcatgtttatgaggagatgataactgggggcccttttggaacagggtagtgaggcaagggttggacaggccccttactcttgctgagtcagaaggcggcacttctggccaggtctctgccatggtccccaggaaggatggggtgtgcctcagttgtttccactcattagaggagtgtaggccttccagtgcaggaaggtcagggacctaggcaacctgggcggggctcatagagctctgcggcttgccactctgaatcctcagcgaccactcctccgagtgggattttctgcagggactcaaaccaactcagtggtggtcgagacctgttcacggatggtgggactggggctgctttacagtttgatacgtgtagataattaagcattttgtgatgtttggacacactggagaaaaggcagtaagaattatttactgaaacatctaggagcttactgaaatatgaaaaggcaaattttatacaaattatttttcctttttcctttctttcttgtccaagttcaggttaaaatcttagaaaattaaatgaaaggtcatttacagttccaaagaagaatattaaacatttttcacttaagttgagatttttgctttaaagagcttttaatgagtttttctgttatcataattttggtccggttattcacttgagttgttgcttatactgttgtcaggtacagtagagagaacatggagcctgctgagatcttctctgttattcctgatcctaagtcatgtatatcgaaggctttgatttagagtaatgcatgaggccagtgtagcggggtcgaggcctgcccatgagtcaggggagctcagtctccctggcctaggcagttgtcctgaccttgagaagacatagatgaagcattttatcatcattagacttaaattttaattcttcagaatgtcagaagttgataggttgttaaatacatttatataatacattaaatatgtgaaattaatacaccttcctacattttgaaggtgatgcatagatcccatagtgtgcatcatgttccttatatgaaaacgtttaaattactgggtcttttccattaaactacttttgtatggcttagataaatcttccattagtgttcatttttatagaattatgctgttaaaactactttaggtgaacaaataaacttgtctattatatattaacgcgactgaactacagtaaatgtttgtgatgtttccaatgctgaatgcctgttagcatatgaggcaaagtgtagtgttataaaaaacagcctgttgactgctgggcccgattctgatatgagttaggtgaccatgagaattgctgtttgaggtccacactgacacacacccattgggtcacaccccctttgcatgtttgtatttcctccctttcatcacatttgtttgaaataaggtacttttatagggttggtatttcagaacactttaggtcatgttgtagtttaaattcttcttgaaaaaggtatatgtgataaataaaaatttttattggaataattattacatggtactacatcaccctgaggaagagaataaattaaaattacacacttgcatgacaaaggcctgtgaaggaattaatgtgatttaagtgttttgtaacttcattttttattcctttagtagagcaaattcttatttttttcgccttcactggtaacagcttttgtgggagcccacaccagtcaagttggatttgaacccagctgctctgtactgcacttagaatgatgtaatattccaggatgctgctgcaggtggcgtatcatcgtacacactcagtgacatttctatcacaatcattttatggaagatgtgtgataatctgtttttactggtattaataaacacatacaatgaagaaaacagataacaaattttaagaccaaggtaagataac

SEQ ID NO: 22938 - DNA, 6172 bp, Homo Sapiens
ggcgggtccctgagctggaagccggagagcaagccctggaggttcactctttcaagaagtcgtgtgctgaggtgtaatgctacacaagtcagaggaaggaagggtcctgaaacacatggcctgattgttggcaaaggcatcataagaagctggcatttatttctgttctaacctattactgtataactgtgaatagacactatgcatatttgttggtcagcaaaaccaagaaacaagagctatggcatttgaaaaagtctgtctgattccagggtgtttttcctgggtttcatcatcaggtacctcctccctttcatctcagcaagaatgtggcaccttttatcgtttgataaagattaaggacatgttctttggtcaacagccagaacttaaaatctgctggaatagggtcagagaccatttcagctgcagctgaggaaaatgaaatgttcattttatttggtgccttgtctggggagcacactaactcttctggaaacgtgtcagtgaaacagagatcgttttgtggaatagcaacccatggttatggcgagtgacccgacgtgatctggggggcaggctgcagaggactcatgacaggctataccatgctgcggaatgggggcgcggggaacggaggtcagacctgcatgctgcgctggtccaaccgcatccgcctcacgtggctcagcttcacgctctttgtcatcctggtcttcttcccgctcatcgcccactattacctcaccactctggatgaggctgatgaggcaggcaagcggatttttggtccccgggtggggaacgagctgtgcgaggtgaagcacgtgctggatctgtgccgcatccgggagtcggtgagtgaagagctcctgcagctggaggccaagcgccaagagctgaacagcgagatcgccaagctgaatctgaagatcgaagcctgtaagaagagcattgagaacgccaagcaggacctgctccagctcaagaatgtcatcagccagaccgagcattcctacaaggagctcatggcccagaaccagcccaagctgtccctgcccatccgactgctcccagagaaggacgatgccggcctccctcccccgaaggccactcggggctgccggctacacaactgctttgattattctcgttgccctctcacctctggcttcccggtctacgtctatgacagtgaccagtttgtctttggcagctacctggatcccttggtcaagcaggcttttcaggcgacagcacgagctaacgtttatgttacagaaaatgcagacatcgcctgcctttacgtgatactagtgggagagatgcaggagcccgtggtgctgcggcctgctgagctggagaagcagttgtattccctgccacactggcggacggatggacacaaccatgtcatcatcaatctgtcacgtaagtcagatacacagaaccttctctataacgtcagtactggccgtgccatggtggcccagtccaccttctacactgtccagtacagacctggctttgacttggtcgtatcaccgctggtccatgccatgtctgagcccaacttcatggaaatcccaccacaggtgccggtgaagcggaaatatctcttcaccttccagggcgagaagattgagtctctgaggtctagccttcaggaggcccgctccttcgaagaggaaatggagggcgaccctcccgccgactacgatgaccggatcattgccaccctgaaggcggtgcaggacagcaagctggatcaggtcctggtggaattcacctgcaaaaaccagcccaaacccagcctgccgactgagtgggcactgtgtggagagcgggaggaccgcttggaattgctgaagctctccaccttcgccctcatcattacccccggggaccctcgcttggttatttcctctgggtgtgcaacacggctcttcgaagccctggaagtcggtgccgtcccggtggtgctgggggagcaggtccagcttccctaccaggacatgctgcagtggaacgaggcggccctggtggtgccaaagcctcgtgttaccgaggttcatttcctgctcagaagcctctccgatagtgacctcctggctatgaggcggcaaggccgctttctctgggagacttacttctccactgctgacagtatttttaataccgtgctggctatgattaggactcgcatccagatcccagccgctcccatccgggaagaggcggcagctgagatcccccaccgttcaggcaaggcggctggaactgaccccaacatggctgacaacggggacctggacctggggccagtggagacggagccgccctacgcctcacccagatacctccgcaatttcactctgactgtcactgacttttaccgcagctggaactgtgctccagggcctttccatcttttcccccacactccctttgaccctgtgttgccctcagaggccaaattcttgggctcagggactggctttcggcctattggtggtggagctgggggttctggcaaggaatttcaggcagcgcttggaggcaatgttccccgagagcagttcacggtggtgatgttgacttatgagcgggaggaagtgcttatgaactctttagagaggctgaatggcctcccttacctgaacaaggtcgtggtggtgtggaattctcccaagctgccatcagaggaccttctgtggcctgacattggcgttcccatcatggtggtccgtactgagaagaacagtttgaacaaccgattcttaccctggaatgaaattgagacagaggccatcctgtccattgatgacgatgctcacctccgccatgacgaaatcatgtttgggttccgggtgtggagagaagctcgggaccgcatcgtgggcttccctggccgttaccacgcatgggacatcccccatcagtcctggctctacaactccaactactcctgtgagctgtccatggtgctgacaggtgctgccttctttcacaagtattatgcctacctgtattcttatgtgatgccccaggccatccgggacatggtggatgaatacatcaactgtgaggacattgccatgaacttccttgtctcccacatcactcggaagccccccatcaaggtgacctcacggtggacattccgatgcccaggatgccctcaggccctgtctcatgatgactcccacttccacgagcggcacaagtgcatcaacttcttcgtgaaggtgtacggctacatgcccctcctgtacacgcagttcagggtggattctgtgctcttcaagacacgcctgccccatgacaagaccaagtgcttcaagttcatctaggggcagcgcacggtctggggaagaggatgagcagagggaggaagatggctcccaaggttcctaggcattgcaggaccttgggcacatctgctggtgggtggcccagagcctctgctggaaggggcagcaggaggagtggaaggaaaccgctgcctttatcttgaagtcagccacactgggcctggagccctgggcggagtccccggggttccccacacagggcactgactgatagcttacactgaggactgtggcgactctgcagagtcactcacaccgttcgtacgcccaggacagctggttcgtggtttttacattcaataacaactattatgattatttaaaaagagaaagtttcagatttgccattcaaggcttatttatatatatgtgtgtgtatataaatacatgcacacacttgcatacatatatatttttggctgggggagtgtgagttttgcctttctaagggagggaccgcgcaggctcctttgttctgtattctggcggagatgggtcctggccttgtgtcactggcttatccttaaagatcatctcccatcctccccagcgccatctgtgtgcagcaaccagaaagggatgaacttggccctcttgcgggcctggacaaggtctcttccttaccctttctgttgccagtcagcaacctgtaactcacattctcttcccagtgaatccctgggagcgcctgaccctggtgggctgttcagcttcctgctgctggggccagcgatttttgaggatttatctttaggccaggcttgcctccgtacttatccctgctctcccatttctctcttgtttgagagagaatgaggaagcaaagagtgagaaagaataggggctgaagacgccactcccagatggctctttctatcctgctcttctgttgaaacacacgtgctgtgggcctcaggcgtttctgaagtgctctttcttggattggacaggagatcagcagcgtgcacatctgctgtggtctgaagtggtttgcaggtcagcctcctctccctagtgtagagcaagccagtgtccttcgaggaacccacccggctggccgggaagttttacagcaaggcgcctgccttgggataattccttggtgaaattcaccttccccccgcctctgtctggagccccatcctgtgttatctgtggtttttggacccctaatgtcagcttggctgtaggactccccgaggtttggtatgtgctagaacaatgggaggctgtgatttgctgtgtaagctcacatccagccttggaatctaacgggcattcacaacccgagttaccactttccactccctgcttaggattctgttccctgggctgaaactgaaataagctaattttttgggtcacggtggcagtaggggaacctaggagggtgtgagtggcatttgtcagggatttagcccatgacgtgtttcttgaaccctactttctggaagtggagttgactctggaagttttctagcaactgaacaaaagctcaggtttgtcctggtcatgcacatgccttaagccagttccgtcttccctagaccttggcatcctgtgcttctatttcttggaatacgttctcctctgacctgcctgtaccacgtgggtcctcttcaagtactgttttgaagctgggctcttttgtgtagctcccacccacctgtagggctagctcggcttaagggaactctccccattggcaaaccggacccggccgccgccaggactgtgtttccaaaggttccccgcccccaaccccagcatcagcctgtagctcccctgctgaggcagtgtggttatgttcccagcagtgggggtcagacgcccttcctcagaactttctagttgccctctacctgactcctgacttgtattccttttagcagtagccttcttccctcggggagccaaagagtgtggtgtgtggcgctatattgtggctgctatttcatctggtttcttttaatgtgaggaactcacatactgacttcagtgggactcggtgagccggggccgtctgtgtggtgggaccccctttagcgggactcagtgagctggggccgtctgtgtggtggagccagggcctctccctttagtggagccaggttgtcgggccccgaatgtcactggtggatctaagaagggctgagtggtctgacaccaaaacatgccgcagggagggctgtggtgccggtgcttccaacaaggacagccctccttgaccctgaaaggaacactggcttgaaggactgcagacaggctctgaggggcacgccctcctcagcgagaggcagcaaggtggccacagtgtcactggtcaggtgcttctcaccacgggaaagccgccgacctgtgactcgcttgagatgggaaagcggcgccacagaccccgggtctccttggctgtctgtgggccgcccctggccaccttgtcctggctcgcagggtgcaggagcgcctcgttctctgggtggccggcttgctgctccggtttgggctgtcttaccataacaccgtcccagggctctgcaggccactgtgagcgctggctccctgggcagtgctcctccgtgtggactgtgcctcaggccagggctcaccagctggggtcctgtccggaaggatgggatctttctgggagctgcgccggacagagtggggagctcctagtttgtggggggaagctttgatatccatgccacgtccatccaccccaccccttttcgtcacgagcacaatggtcttacattggatttttgtaaaaaaataaaaataaatggagactttaactc

SEQ ID NO: 22939 - DNA, 2683 bp, Homo Sapiens
tgggcgccggcggagcggagggagatccgagcggcggcggcaagctggctgcgagcggctgagcactccaagctcgccggcctttggtctccaggacttgtcccagcagcccctcgaactgagaattacaccatcggacccctggctctgaggccttcagacttggactgtgtcacactgccaggcttccagggctccaacttgcagacggcctgttgtgggacagtctctgtaatcgcgaaagcaaccatggaagacctgggggaaaacaccatggttttatccaccctgagatctttgaacaacttcatctctcagcgtgtggagggaggctctggactggatatttctacctcggccccaggttctctgcagatgcagtaccagcagagcatgcagctggaggaaagagcagagcagatccgttcgaagtcccacctcatccaggtggagcgggagaaaatgcagatggagctgagtcacaagagggctcgagtggagctggagagagcagccagcaccagtgccaggaactacgagcgtgaggtcgaccgcaaccaggagctcctgacgcgcatccggcagcttcaggagcgggaggccggggcggaggagaagatgcaggagcagctggagcgcaacaggcagtgtcagcagaacttggatgctgccagcaagaggctgcgtgagaaagaggacagtctggcccaggctggcgagaccatcaacgcactgaaggggaggatctcggaactgcagtggagcgtgatggaccaggagatgcgggtgaagcgcctggagtcggagaagcaggacgtgcaggagcagctggacctgcaacacaaaaaatgccaggaagccaatcagaaaatccaggaactccaggccagccaagaagcaagagcagaccacgagcagcagattaaggatctggagcagaagctgtccctgcaagagcaggatgcagcgattgtgaagaacatgaagtctgagctggtacggctccctaggctggaacgggagctggagcagctgcgggaggagagcgcgcacctgcgggagatgagagagaccaacgggctgctccaggaagagctggaagggctgcagaggaagctggggcgccaggagaagatgcaggagacgctggttggcttggagctggagaacgagaggctgctggccaagctgcaaagctgggagagactggaccagaccatgggcctgagcatcaggactccagaagacctttccagattcgtggttgagctgcagcagagggagcttgccttgaaggacaagaacagcgccgtcaccagcagcgcccgggggctggagaaggccaggcagcagctgcaggaggagctccggcaggtcagcggccagctgttggaggagaggaagaagcgcgagacccacgaggcgctggcccggaggctccagaaacgggtcctgctgctcaccaaggagcgggacggtatgcgggccatcctggggtcctacgacagcgagctgaccccggccgagtactcaccccagctgacgcggcgcatgcgggaggctgaggatatggtgcagaaggtgcacagccacagcgccgagatggaggctcagctgtcgcaggccctggaggagctgggaggccagaaacaaagagcagacatgctggagatggagctgaagatgctgaagtctcagtccagctctgccgaacagagcttcctgttctccagggaggaggcggacacgctcaggttgaaggtcgaggagctggaaggcgagcggagtcggctggaggaggaaaagaggatgctggaggcacagctggagcggcgagctctgcagggtgactatgaccagagcaggaccaaagtgctgcacatgagcctgaaccccaccagtgtggccaggcagcgcctgcgcgaggaccacagccagctgcaggcggagtgcgagcgactgcgcgggctcctgcgcgccatggagagaggaggcaccgtcccagccgaccttgaggctgccgccgcgagtctgccatcgtccaaggaggtggcagagctgaagaagcaggtggagagtgccgagctgaagaaccagcggctcaaggaggttttccagaccaagatccaggagttccgcaaggcctgctacacgctcaccggctaccagatcgacatcaccacggagaaccagtaccggctgacctcgctgtacgccgagcacccaggcgactgcctcatcttcaaggccaccagcccctcgggttccaagatgcagctactggagacagagttctcacacaccgtgggcgagctcatcgaggtgcacctgcggcgccaggacagcatccctgccttcctcagctcgctcaccctcgagctcttcagccgccagaccgtggcgtagcctgcaggctcgggggcatagccggagccactctgcttggcctgacctgcaggtcccctgccccgccagccacaggctgggtgcacgtcctgcctctccagccccacagggcagcagcatgactgacagacacgctgggacctacgtcgggcttcctgctggggcggccagcaccctctccacgtgcagaccccatgcgtcccggagcctggtgtgtgggcgtcggccaccagcctgggttcctcaccttgtgaaataaaatcttctcccctaaaaa

SEQ ID NO: 22940 - DNA, 1857 bp, Homo Sapiens
ccgccgcagccgccgcagcagcagcagccgccgccccaggccccccccatggagcccgaggccccggattcccgcaagaggcccctcgaaacgccccccgaggtggtctgcaccaagcgcagcaacacgggagaggaaggcgaatacttcctgaaggtgctgatccccagctacgcggcgggctccatcattggcaagggcgggcagaccatcgtgcagctgcagaaggagaccggagccaccatcaagctctccaagtccaaagacttctaccccggaaccacagagcgggtatgcctagtacagggcacggcagaggccttgaatgctgtgcacagctttattgccgagaaggtccgagaaatcccacaagcgatgaccaagcctgaggtggtcaacatccttcaaccccaaaccacgatgaaccccgacagagccaagcaggccaagctgatcgtccccaacagcacggcgggcctgatcatcggcaagggaggcgccacggtgaaagccgtgatggaacagtcaggagcatgggtgcagctgtcccagaagccggagggcatcaacctgcaggagcgcgtggtgacggtcagcggcgagcccgagcaggtgcacaaggccgtgagcgccatcgtgcagaaggtacaagaagacccccagagcagcagctgcctcaacatcagctacgccaacgtggcaggccccgtggccaactccaaccccaccggctctccgtacgccagccccgcggatgtgcttccagccgcggccgcagcgtcggccgccgccgcctccggcctgctgggccccgccgggctggctggcgtgggggcctttcccgccgcgctgcccgccttctcaggcaccgacctgctggccatcagcacggcgcttaacacgctggccagttacggctacaacaccaactccctgggcctgggcctcaactcggccgcagcttccggcgtcctggccgccgtggccgccggggccaacccagcggccgccgccgccgccaacctcctggcatcctacgcgggcgaggccggggccgggccagccggaggggccgccccgccgccgcccccgcctcccggagccctggggtcctttgcgttggccgcagccgccaacggctacctcggggccggggcgggcggcggggcgggcggagggggcggcccgctggtggccgctgcagccgcggccggggcggccgggggcttcctgacggcggagaagctggcggctgagagtgccaaggagctggtggagattgcggtgcctgagaacctggtgggagccatcctggggaaggggggcaagacgttggtggagtaccaggagctgacgggcgctcgcatccagatctccaagaagggcgagttcctgccaggcacgcggaaccggcgggtcaccatcacgggcagccccgcggccacgcaagccgctcaatacctcatcagtcagcgggtcacctacgagcagggagtgagggcctcaaacccccagaaagtgggatgaggcctgtggtgtgtgctcccacccttttctctcctcccatctcctcctcttccctctcctcctcccccccaactcctgacctcagcttggtgtagtcctgctcctcttgggatggggctggggtaggcccgactgcaccctccccttctggtagtcataggcaggattgagtgacggttgggaagggggctcagaagccccctccccagcccggaactgacccctccttcctccctccctgtgcttggctgggcctgacccttcctgtcccagggcccaggtctgtgtgatatctgtatatattgcattttgttgattttaatagaaaac

SEQ ID NO: 22941 - DNA, 2588 bp, Homo Sapiens
  misc_feature (230)..(230): n is a, c, g, or t
  misc_feature (260)..(260): n is a, c, g, or t
  misc_feature (290)..(290): n is a, c, g, or t
  misc_feature (334)..(334): n is a, c, g, or t
  misc_feature (337)..(337): n is a, c, g, or t
  misc_feature (360)..(360): n is a, c, g, or t
  misc_feature (2204)..(2204): n is a, c, g, or t
  misc_feature (2273)..(2273): n is a, c, g, or t
  misc_feature (2287)..(2287): n is a, c, g, or t
  misc_feature (2311)..(2311): n is a, c, g, or t
  misc_feature (2343)..(2343): n is a, c, g, or t
  misc_feature (2544)..(2544): n is a, c, g, or t
  misc_feature (2559)..(2559): n is a, c, g, or t
  misc_feature (2566)..(2566): n is a, c, g, or t
gggaggggtgcgaggctagccacgcaggcggggccctgggtcattttaaactctcagagtgaacgtcttgataggaccgacaagacgcatgacatgtacttagatagcttatcttagagccacactgagattggaacccgcaaaatatgccagggaggaaggtgagcaagggacacgacactcacccggataaacccaacaagcgcagcgaggctgtggggaaaccgganccctgcacaccgccgggggaaggtgggccnccgccaccaccgtggaagaacagcgcggangcaccccacgagatgagacggaactgccgtgagatccagcaatnccnactgtgggtctgacccaggatancggaaagcagggacgtgaacagccctcctcatgttcttgacaccgtcattctcagcagctcagctaaggcacagaggcagccgagcgtctgtcagcagagtcgtggctgagcagaacacgccacacgccacacgccacacgccacacgtgcaggattgctcaagatggaagggcacagtggaatatatatatatatttatatttttggcgagaccctggaggacacactgaatacaatggaataccatcccgcctttgaaaggaagggaaatcctggcacacgctgcaacaggagggagcttgaggacactgtggtgagtggagcacgtgagacacggaaggacacacgctgaagacacgcagagatgcccacccacgtggggaggtgacaggggagcccagcgcacagagacaaagtggaatggaggcctgggggctgggagcaaatgcggagcgagtgcttcctggggcagagtctccgtttgggaagatgagaaggttctgccgacggatgctggcgatggttgcagaagaatgtgaatgtgcccaatgctactgaaaaacggttacaatggaaacgccaccccagtgaccaccactgccccgtgggcctccctgggcctctccgccaagacctgcaacaacgtgtccttcgaagagagcaggatagtcctggtcgtggtgtacagcgcggtgtgcacgctgggggtgccggccaactgcctgactgcgtggctggcgctgctgcaggtactgcagggcaacgtgctggccgtctacctgctctgcctggcactctgcgagctgctgtacacaggcacgctgccactctgggtcatctatatccgcaaccagcaccgctggaccctaggcctgctggcctgcaaggtgaccgcctacatcttcttctgcaacatctacgtcagcatcctcttcctgtgctgcatctcctgcgaccgcttcgtggccgtggtgtacgcgctggagagtcggggccgccgccgccggaggaccgccatcctcatctccgcctgcatcttcatcctcgtcgggatcgttcactacccggtgttccagacggaagacaaggagacctgctttgacatgctgcagatggacagcaggattgccgggtactactacgccaggttcaccgttggctttgccatccctctctccatcatcgccttcaccaaccaccggattttcaggagcatcaagcagagcatgggcttaagcgctgcccagaaggccaaggtgaagcactcggccatcgcggtggttgtcatcttcctagtctgcttcgccccgtaccacctggttctcctcgtcaaagccgctgccttttcctactacagaggagacaggaacgccatgtgcggcttggaggaaaggctgtacacagcctctgtggtgtttctgtgcctgtccacggtgaacggcgtggctgaccccattatctacgtgctggccacggaccattcccgccaagaagtgtccagaatccataaggggtggaaagagtggtccatgaagacagacgtcaccaggctcacccacagcagggacaccgaggagctgcagtcgcccgtggcccttgcagaccactacaccttctccaggcccgtgcacccaccagggtcaccatgccctgcaaagaggctgattgaggagtcctgctgagcccactgtgtggcagggggatggcaggttgggggtcctggggccagcaatgtggttcctgtgcactgagcccaccagccacagtgcccatgtcccctctggaagacaaactaccaatttctcgttcctgaagccactccctccgtgaccactggccccangctttcccacatggaaggtggctgcatgccaaggggaagagcgacacctccaggcttccgggagcccanagagcatgtggcangcagtggggcctcttcatcatcancctgcctggctggctcccttggctgtgggcangtacacccctgctggcagaagtacctggtggctgccctgttcgcatcagtggcgatgactttatttgcggagcatttctgcaagcgttgcctggatgcggtggtgcattgtgggccctctgggctcctgcctcaaaatgtcagtgagcaccatgctggaagtcaccatcactgtggcagcgcccaggaaggcatagggcancctaccacctccaanggggcangcgccctcatctggggttgggt

SEQ ID NO: 22942 - DNA, 2615 bp, Homo Sapiens
gaattccgggaagccagacggttaacacagacaaagtgctgccgtgacactcggccctccagtgttgcggagaggcaagagcagcgaccgcgcacctgtccgcccggagctgggacgcgcgcccgggcggccggacgaagcgaggagggaccgccgaggctgcccccaagtgtaactccagcactgtgaggtttcagggattggcagaggggaccaaggggacatgaaaatggacatggaggatgcggatatgactctgtggacagaggctgagtttgaagagaagtgtacatacattgtgaacgaccacccctgggattctggtgctgatggcggtacttcggttcaggcggaggcatccttaccaaggaatctgcttttcaagtatgccaccaacagtgaagaggttattggagtgatgagtaaagaatacataccaaagggcacacgttttggacccctaataggtgaaatctacaccaatgacacagttcctaagaacgccaacaggaaatatttttggaggatctattccagaggggagcttcaccacttcattgacggctttaatgaagagaaaagcaactggatgcgctatgtgaatccagcacactctccccgggagcaaaacctggctgcgtgtcagaacgggatgaacatctacttctacaccattaagcccatccctgccaaccaggaacttcttgtgtggtattgtcgggactttgcagaaaggcttcactacccttatcccggagagctgacaatgatgaatctcacacaaacacagagcagtctaaagcaaccgagcactgagaaaaatgaactctgcccaaagaatgtcccaaagagagagtacagcgtgaaagaaatcctaaaattggactccaacccctccaaaggaaaggacctctaccgttctaacatttcacccctcacatcagaaaaggacctcgatgactttagaagacgtgggagccccgaaatgcccttctaccctcgggtcgtttaccccatccgggcccctctgccagaagactttttgaaagcttccctggcctacgggatcgagagacccacgtacatcactcgctcccccattccatcctccaccactccaagcccctctgcaagaagcagccccgaccaaagcctcaagagctccagccctcacagcagccctgggaatacggtgtcccctgtgggccccggctctcaagagcaccgggactcctacgcttacttgaacgcgtcctacggcacggaaggtttgggctcctaccctggctacgcacccctgccccacctcccgccagctttcatcccctcgtacaacgctcactaccccaagttcctcttgcccccctacggcatgaattgtaatggcctgagcgctgtgagcagcatgaatggcatcaacaactttggcctcttcccgaggctgtgccctgtctacagcaatctcctcggtgggggcagcctgccccaccccatgctcaaccccacttctctcccgagctcgctgccctcagatggagcccggaggttgctccagccggagcatcccagggaggtgcttgtcccggcgccccacagtgccttctcctttaccggggccgccgccagcatgaaggacaaggcctgtagccccacaagcgggtctcccacggcgggaacagccgccacggcagaacatgtggtgcagcccaaagctacctcagcagcgatggcagcccccagcagcgacgaagccatgaatctcattaaaaacaaaagaaacatgaccggctacaagacccttccctacccgctgaagaagcagaacggcaagatcaagtacgaatgcaacgtttgcgccaagactttcggccagctctccaatctgaaggtccacctgagagtgcacagtggagaacggcctttcaaatgtcagacttgcaacaagggctttactcagctcgcccacctgcagaaacactacctggtacacacgggagaaaagccacatgaatgccaggtctgccacaagagatttagcagcaccagcaatctcaagacccacctgcgactccattctggagagaaaccataccaatgcaaggtgtgccctgccaagttcacccagtttgtgcacctgaaactgcacaagcgtctgcacacccgggagcggccccacaagtgctcccagtgccacaagaactacatccatctctgtagcctcaaggttcacctgaaagggaactgcgctgcggccccggcgcctgggctgcccttggaagatctgacccgaatcaatgaagaaatcgagaagtttgacatcagtgacaatgctgaccggctcgaggacgtggaggatgacatcagtgtgatctctgtagtggagaaggaaattctggccgtggtcagaaaagagaaagaagaaactggcctgaaagtgtctttgcaaagaaacatggggaatggactcctctcctcagggtgcagcctttatgagtcatcagatctacccctcatgaagttgcctcccagcaacccactacctctggtacctgtaaaggtcaaacaagaaacagttgaaccaatggatccttaagattttcagaaaacacttattt

SEQ ID NO: 22943 - DNA, 5860 bp, Homo Sapiens
atgcaggagagccagaccaagagcatgttcgtgtcccgggccctggagaagatcctagccgacaaggaggtgaagcggccccagcactcccagctgcgcagggcctgccaggtggcgctcgatgaaattaaagcagaaatagaaaagcagaggcttggcactgctgcaccaccaaaggcaaacttcattgaagctgacaagtattttcttccattcgagctagcttgccagtccaagtccccaagggtagtcagcacatcccttgactgcttgcagaaactcatcgcatacgggcacatcactggcaacgcccctgacagtggagcccctgggaagcggctgatcgacagaattgttgaaaccatttgcagttgttttcagggccctcagactgatgaaggggttcagttacaaataattaaggctcttctgactgcagtgacttccccacacattgaaattcatgagggtactatcctgcagacagtgagaacatgttacaatatctatttggccagcaaaaatctcatcaatcaaaccactgccaaggctacccttactcagatgctgaacgtcattttcacccgcatggaaaaccaagtgttgcaggaggccagaagactggaaaaaccaatccagtcaaaaccccagtcccctgtgatccaagctgcagcagtatccccaaagttcgttcgtttgaagcacagtcaggcacaaagcaaaccaacaactcccgaaaaaacagatttaaccaacggtgaacatgccaggagtgattctggaaaagtaagcacagaaaatggagacgcacccagagaaagaggctcatcactgtcagggactgatgacggagcccaggaggtggtgaaggacatcttggaagatgtagtcacatctgccattaaagaagcagcggaaaagcatggtctgacagaacctgagagagttctaggtgaactggagtgccaggaatgtgctattcccccaggagttgatgaaaactcacagaccaacgggatagccgatgacaggcagtccttgtcgtcagcagataatctggaatcggatgcacaaggacatcaagtggctgccaggttctcccacgttctgcagaaggatgccttccttgtgttccgctccctgtgcaagctgtccatgaaaccccttggtgaaggccctccagacccaaaatcccatgagctgcgttccaaggtggtttccctgcagctgctcctctctgtgttgcaaaatgctggccccgtattcaggactcacgagatgttcatcaatgcaatcaagcaatatctctgtgtggccttgtccaaaaacggcgtctcttcagtgcctgatgtctttgagctctctcttgccatttttcttactcttctttcaaactttaaaatgcacttgaaaatgcagatagaggtctttttcaaagagattttcctgaacattttagaaacatcaacaagttcttttgagcacaggtggatggtcattcagactctgacgaggatctgtgcagatgcccagtgtgttgtggatatttatgtcaactacgactgtgatttaaatgctgctaacatttttgagcgccttgtaaatgatttatccaaaattgctcagggaagaagtggacatgagctgggaatgacacctctgcaggagctcagcctgaggaagaaaggcctggagtgcctcgtgtccattctcaagtgcatggtggagtggagcaaagacctgtatgtgaatcccaaccaccagaccagcctcggtcaggagaggctcacggatcaggaaataggggatgggaaaggccttgacatggcaagacggtgtagtgtgacgtccatggagtccacagtgtcctcggggacccagacaactgttcaggatgaccctgagcaatttgaggtcatcaagcaacaaaaagaaatcattgaacacggcatcgagctgttcaacaagaaacccaagagggggatccagtttctccaggagcagggcatgctgggaacgtcagttgaagacatagcccaattcctgcaccaggaggagcgcctggattccacccaagtaggcgattttctgggagatagcgcaaggttcaacaaggaggtgatgtatgcctacgtggaccaacttgacttctgtgaaaaagaatttgtctcagccctgcggacattcctagaaggtttccgcctacctggagaagcccaaaagattgaccgattaatggagaagtttgccgcaagatacatagaatgcaaccaagggcaaactctgtttgctagtgctgacactgcttatgtcctagcgtattcaattattatgctgactacagacttgcacagtcctcaggtaaaaaataaaatgacgaaagagcagtatattaaaatgaatcggggtatcaatgatagtaaagatctgccagaagagtatctctcaagcatctatgaagagatagaaggcaagaaaattgcaatgaaagaaacaaaagagctaacgattgcaaccaaatctactaagcagaatgtagctagtgaaaagcagcggcggctgctgtacaacttagagatggagcaaatggctaaaacagccaaagctctgatggaggctgtgagccatgccaaagccccgtttaccagtgccactcacctggaccatgtccggccaatgttcaaactggtgtggacgccactattggcagcctacagcatcggactccagaactgtgatgacactgaagtggcctccttgtgtttggaaggcatccgatgtgcaatccgaatcgcctgcatctttggaatgcagctggaacgagatgcctatgttcaggctcttgctcgcttctccctactcacagccagctccagcatcacaaaaatgaagcagaaaaacatcgacaccattaagacgcttatcacagtggctcacaccgatggcaactaccttgggaattcctggcatgagatcttgaaatgcatcagccagctggagctcgctcagctgataggaaccggtgtgaagacgcgctacctgtctggatctgggcgtgaaagagaagggagcctgaagggccacacattggcaggagaagagttcatgggccttggcctcggtaatttggtgagtggcggagtgaataaaagacagatggccagcttccaagaatcggttggtgagaccagctcgcagagtgtggttgtagctgtggacaggatttttactgggtctaccagactggatggaaatgcaatagttgactttgtccgctggctgtgtgctgtgtccatggatgaactggcttccccccaccatcctcgcatgttcagcttgcagaagattgtggagatatcatactacaacatgaatcggatccgactacagtggtctcgaatatggcatgtgattggagatcacttcaataaggttggctgcaaccctaatgaagatgtggctatctttgctgttgactcattaaggcaactctccatgaagtttcttgagaagggtgaattagccaacttccgtttccagaaagattttctgaggccctttgagcatattatgaagaaaaacaggtctcccaccatccgggacatggcgatccgctgcattgcccagatggtgaactcccaggcggccaacatccgctcaggctggaagaacatctttgccgtgttccaccaggcagcctctgatcatgatgggaacattgtggagctggccttccagaccacttgccacattgtcacaactattttccagcaccattttcctgcagccatcgattcctttcaggatgctgtgaagtgcttatcagagttcgcctgcaacgccgctttccctgacacgagcatggaagcgattcggctcatccgcttctgtggcaaatacgtctctgagaggcctcgggtgctacaagaatacacaagtgatgacatgaatgtagctcctggtgacagagtctgggtccgaggctggttccccatcttattcgaactctcctgcatcattaatagatgcaagttagatgtacgaacaaggggactcacagtcatgtttgagatcatgaagagctatggccacacctttgaaaagcactggtggcaggacctgttcagaatcgtgtttcggatttttgacaatatgaaactccctgagcaactgtcagagaaatctgagtggatgacaacaacctgcaatcacgcactttatgctatttgtgatgtttttacccagttttatgaagctttgaatgaagttcttctttctgatgtatttgcacaattgcagtggtgtgtcaaacaagataatgaacagttggcgcgatcaggtacaaattgcttagaaaacttagtaatatccaatggagagaaattcagtcctgaagtctgggatgaaacctgcaactgtatgttggatattttcaaaacaaccatcccacatgttttgctgacatggagacctgtaggaatggaggaagattcatcagaaaagcatttggatgtggatctggaccgccagtctttaagcagcatagataaaaatccctctgagaggggacagagccagctctctaacccaacagatgacagctggaagggtagaccatacgcaaatcagaaactgtttgccagcctcctcatcaagtgtgtggtccagttggaattgatacagaccattgacaacattgtgttctaccctgcgacgagcaaaaaggaggatgcagagcacatggttgccgcccagcaagacacgctggatgcagatatccacatagagacggaggatcagggcatgtataagtacatgtcttcccagcacctcttcaagctgttggactgtttgcaggaatcccattcattctcaaaggccttcaactccaattacgagcagcggactgtcctgtggcgagcaggttttaagggcaagtctaaacccaatcttctaaaacaagaaaccagcagcctggcctgttgtttgaggatcctgtttcgaatgtatgttgatgagaaccgcagggattcctgggaagaaatacagcagagacttttaactgtttgcagtgaagctcttgcctatttcatcactgtgaattctgagagccatcgggaggcctggacaagtctcttgttgttacttctaactaaaaccctcaaaataaatgatgaaaagttcaaagcacatgcttcaatgtactacccctacttgtgtgaaattatgcagtttgacctgatccctgagctccgagcagttctgcggaagttcttcctacggataagtgttgtgtataagatatggataccagaagagccatcacaggtaccagcagcactgtcaccagtgtggtagccctggctgcccaggccagtgctgcagctctgcagaatgttcagcatgccatttctgactggcacatctcgtgaagtttcatagaaacaaggagttggcatcttggatctcagaatggcctggaaacggatggcctctacgctgttccatcacagtctccaactaaggcttatggtatttcattaaactgttgcatacccagttagcacagtaggtggggagtctgcttcatttctatcattccatttttctgattaaactgtcaaatctgtcattgcatatgccatcgttttctagcaaaatcccatgattggctataaacgttttgtaagaagtcactctccttgaaaatactgaacatagctgtataggtttgtgattattagagaatatgttaataaaacttcttgtaacggctaactgccacctaaaatatgctgggttttctgttgtttgagtgtgttagagaaatttgaatgtttttgtcagttacgagtcagcc

SEQ ID NO: 22944 - DNA, 2905 bp, Homo Sapiens
cctctgaaggttctagaatcgatagtgaattcgtgggacgggaagaggaagcactgcctttacttcagtgggaatctcggcctcagcctgcaagccaagtgttcacagtgaaaaaagcaagagaataagctaatactcctgtcctgaacaaggcagcggctccttggtaaagctactccttgatcgatcctttgcaccggattgttcaaagtggaccccaggggagaagtcggagcaaagaacttaccaccaagcagtccaagaggcccagaagcaaacctggaggtgagacccaaagaaagctggaaccatgctgactttgtacactgtgaggacacagagtctgttcctggaaagcccagtgtcaacgcagatgaggaagtcggaggtccccaaatctgccgtgtatgtggggacaaggccactggctatcacttcaatgtcatgacatgtgaaggatgcaagggctttttcaggagggccatgaaacgcaacgcccggctgaggtgccccttccggaagggcgcctgcgagatcacccggaagacccggcgacagtgccaggcctgccgcctgcgcaagtgcctggagagcggcatgaagaaggagatgatcatgtccgacgaggccgtggaggagaggcgggccttgatcaagcggaagaaaagtgaacggacagggactcagccactgggagtgcaggggctgacagaggagcagcggatgatgatcagggagctgatggacgctcagatgaaaacctttgacactaccttctcccatttcaagaatttccggctgccaggggtgcttagcagtggctgcgagttgccagagtctctgcaggccccatcgagggaagaagctgccaagtggagccaggtccggaaagatctgtgctctttgaaggtctctctgcagctgcggggggaggatggcagtgtctggaactacaaacccccagccgacagtggcgggaaagagatcttctccctgctgccccacatggctgacatgtcaacctacatgttcaaaggcatcatcagctttgccaaagtcatctcctacttcagggacttgcccatcgaggaccagatctccctgctgaagggggccgctttcgagctgtgtcaactgagattcaacacagtgttcaacgcggagactggaacctgggagtgtggccggctgtcctactgcttggaagacactgcaggtggcttccagcaacttctactggagcccatgctgaaattccactacatgctgaagaagctgcagctgcatgaggaggagtatgtgctgatgcaggccatctccctcttctccccagaccgcccaggtgtgctgcagcaccgcgtggtggaccagctgcaggagcaattcgccattactctgaagtcctacattgaatgcaatcggccccagcctgctcataggttcttgttcctgaagatcatggctatgctcaccgagctccgcagcatcaatgctcagcacacccagcggctgctgcgcatccaggacatacacccctttgctacgcccctcatgcaggagttgttcggcatcacaggtagctgagcggctgcccttgggtgacacctccgagaggcagccagacccagagccctctgagccgccactcccgggccaagacagatggacactgccaagagccgacaatgccctgctggcctgtctccctagggaattcctgctatgacagctggctagcattcctcaggaaggacatgggtgccccccacccccagttcagtctgtagggagtgaagccacagactcttacgtggagagtgcactgacctgtaggtcaggaccatcagagaggcaaggttgccctttccttttaaaaggccctgtggtctggggagaaatccctcagatcccactaaagtgtcaaggtgtggaagggaccaagcgaccaaggataggccatctggggtctatgcccacatacccacgtttgttcgcttcctgagtcttttcattgctacctctaatagtcctgtctcccacttcccactcgttcccctcctcttccgagctgctttgtgggctcaaggcctgtactcatcggcaggtgcatgagtatctgtgggagtcctctagagagatgagaagccaggaggcctgcaccaaatgtcagaagcttggcatgacctcattccggccacatcattctgtgtctctgcatccatttgaacacattattaagcactgataataggtagcctgctgtggggtatacagcattgactcagatatagatcctgagctcacagagtttatagttaaaaaaacaaacagaaacacaaacaatttggatcaaaaggagaaaatgataagtgacaaaagcagcacaaggaatttccctgtgtggatgctgagctgtgatggcaggcactgggtacccaagtgaaggttcccgaggacatgagtctgtaggagcaagggcacaaactgcagctgtgagtgcgtgtgtgtgatttggtgtaggtaggtctgtttgccacttgatggggcctgggtttgttcctggggctggaatgctgggtatgctctgtgacaaggctacgctgacaatcagttaaacacaccggagaagaaccatttacatgcaccttatatttctgtgtacacatctattctcaaagctaaagggtatgaaagtgcctgccttgtttatagccacttgtgagtaaaaatttttttgcattttcacaaattatactttatataaggcattccacacctaagaactagttttgggaaatgtagccctgggtttaatgtcaaatcaaggcaaaaggaattaaataatgtacttttggctaaaaaaaaaaaaaaaaaaaaaaaaaaaaaaaaaaaaaaaaaaaaaaaa

SEQ ID NO: 22945 - DNA, 2912 bp, Homo Sapiens
tgcacatgcgatctctgagatatgtacacagtcattcttactatcgcactcagccattcttactacgctaaagaagaaataattattcgaggatatttgcctggcccagaagaaacttatgtaaatttcatgaactattatatccgttttcctcggagtgagagaaaactctttttagatatcatctgagaggtagttaatttggcaccatggggatacagggattgctacaatttatcaaagaagcttcagaacccatccatgtgaggaagtataaagggcaggtagtagctgtggatacatattgctggcttcacaaaggagctattgcttgtgctgaaaaactagccaaaggtgaacctactgataggtatgtaggattttgtatgaaatttgtaaatatgttactatctcatgggatcaagcctattctcgtatttgatggatgtactttaccttctaaaaaggaagtagagagatctagaagagaaagacgacaagccaatcttcttaagggaaagcaacttcttcgtgaggggaaagtctcggaagctcgagagtgtttcacccggtctatcaatatcacacatgccatggcccacaaagtaattaaagctgcccggtctcagggggtagattgcctcgtggctccctatgaagctgatgcgcagttggcctatcttaacaaagcgggaattgtgcaagccataattacagaggactcggatctcctagcttttggctgtaaaaaggtaattttaaagatggaccagtttggaaatggacttgaaattgatcaagctcggctaggaatgtgcagacagcttggggatgtattcacggaagagaagtttcgttacatgtgtattctttcaggttgtgactacctgtcatcactgcgtgggattggattagcaaaggcatgcaaagtcctaagactagccaataatccagatatagtaaaggttatcaagaaaattggacattatctcaagatgaatatcacggtaccagaggattacatcaacgggtttattcgggccaacaataccttcctctatcagctagtttttgatcccatcaaaaggaaacttattcctctgaacgcctatgaagatgatgttgatcctgaaacactaagctacgctgggcaatatgttgatgattccatagctcttcaaatagcacttggaaataaagatataaatacttttgaacagatcgatgactacaatccagacactgctatgcctgcccattcaagaagtcgtagttgggatgacaaaacatgtcaaaagtcagctaatgttagcagcatttggcataggaattactctcccagaccagagtcgggtactgtttcagatgccccacaattgaaggaaaatccaagtactgtgggagtggaacgagtgattagtactaaagggttaaatctcccaaggaaatcatccattgtgaaaagaccaagaagtgcagagctgtcagaagatgacctgttgagtcagtattctctttcatttacgaagaagaccaagaaaaatagctctgaaggcaataaatcattgagcttttctgaagtgtttgtgcctgacctggtaaatggacctactaacaaaaagagtgtaagcactccacctaggacgagaaataaatttgcaacatttttacaaaggaaaaatgaagaaagtggtgcagttgtggttccagggaccagaagcaggtttttttgcagttcagattctactgactgtgtatcaaacaaagtgagcatccagcctctggatgaaactgctgtcacagataaagagaacaatctgcatgaatcagagtatggagaccaagaaggcaagagactggttgacacagatgtagcacgtaattcaagtgatgacattccgaataatcatattccaggtgatcatattccagacaaggcaacagtgtttacagatgaagagtcctactcttttaagagcagcaaatttacaaggaccatttcaccacccactttgggaacactaagaagttgttttagttggtctggaggtcttggagatttttcaagaacgccgagcccctctccaagcacagcattgcagcagttccgaagaaagagcgattcccccacctctttgcctgagaataatatgtctgatgtgtcgcagttaaagagcgaggagtccagtgacgatgagtctcatcccttacgagaaggggcatgttcttcacagtcccaggaaagtggagaattctcactgcagagttcaaatgcatcaaagctttctcagtgctctagtaaggactctgattcagaggaatctgattgcaatattaagttacttgacagtcaaagtgaccagacctccaagctatgtttatctcatttctcaaaaaaagacacacctctaaggaacaaggttcctgggctatataagtccagttctgcagactctctttctacaaccaagatcaaacttctaggacctgccagagccagtgggctgagcaagaagccggcaagcatccagaagagaaagcatcataatgccgagaacaagccggggttacagatcaaactcaatgagctctggaaaaactttggatttaaaaaagattctgaaaagcttcctccttgtaagaaacccctgtccccagtcagagataacatccaactaactccagaagcggaagaggatatatttaacaaacctgaatgtggccgtgttcaaagagcaatattccagtaaatgcagactgctgcaaagcttttgcctgcaagagaatctgatcaatttgaagtccctgtttgggaatgaggcacttatcagcatgaagaattttttctcattctgtgccattttaaaaatagaatacatttgtatattaactttaaaaaaaaaaaaaaaaaa

SEQ ID NO: 22946 - DNA, 3984 bp, Homo Sapiens
ctgctgactgtttcttcggatgcattttttggtgtgctcttgagggattaaatgcaaagagatcacaccatggactacaaggaaagctgcccaagtgtaagcattcccagctccgatgaacacagagagaaaaagaagaggtttactgtttataaagttctggtttcagtgggaagaagtgaatggtttgtcttcaggagatatgcagaggttgataaactttataacactttaaaaaaacagtttcctgctatggccctgaagattcctgccaagagaatatttggtgataattttgatccagattttattaaacaaagacgagcaggactaaacgaattcattcagaacctagttaggtatccagaactttataaccatccagatgtcagagcattccttcaaatggacagtccaaaacaccagtcaggtccatctgaagatgaggatgaaagaagttctcagaagctacactctacctcacagaacatcaacctgggaccgtctggaaatcctcatgccaaaccaactgactttgatttcttaaaagttattggaaaaggcagctttggcaaggttcttcttgcaaaacggaaactggatggaaaagtttatgctgtcaaagtgttacagaaaaaaatagttctcaacagaaaagagcaaaaacatattatggctgaacgtaatgtgctcttgaaaaatgtgaaacatccgtttttggttggattgcattattccttccaaacaactgaaaagctttattttgttctggattttgttaatggaggggagctttttttccacttacaaagagaacggtcctttcctgagcacagagctaggttttacgctgctgaaattgctagtgcattgggttacttacattccatcaaaatagtatacagagacttgaaaccagaaaatattcttgtggattcagtaggacatgttgtcttaacagattttgggctttgtaaagaaggaattgctatttctgacaccactaccacattttgtgggacaccagagtatcttgcacctgaagtaattagaaaacagccctatgacaataccgtagattggtggtgccttggggctgttctgtatgaaatgctgtatggattgcctcctttttattgccgagatgttgctgaaatgtatgacaatatccttcacaaacccctaagtttgaggccaggagtgagtcttagagcctggtccattctggaagaactcctagaaaaagacaggcaaaatcgacttggtgccaaggaagactttcttgaaattcagaatcatcctttttttgaatcactcagctgggctgaccttgtacaaaagaagattccaccaccatttaatcctaatgtggctggaccagatgatatcagaaactttgacacagcatttacagaagaaacagttccatattctgtgtgtgtatcttctgactattctatagtgaatgccagtgtattggaggcagatgatgcattcgttggtttctcttatgcacctccttcagaagacttatttttgtgagcagttgccatacagaaaccattgagcaaaataagtctatagatgggactgaaacttctatttgtgtgaatatattcaaatatgtataactagtgcctcatttttatatgtaatgatgaaaactatgaaaaaatgtattttcttctatgtgcaagaaaaatagggcatttcaaagagctgttttgattaaaatttatattcttgtttaataagcttatttttaaacaatttaaaagctattattcttagcattaacctatttttaaagaaacctttttgctattgactgttttttccctctaagtttacactaacatctacccaagatagactgttttttaacagtcaatttcagttcagctaacatatattaatacctttgtaactctttgctatggcttttgttatcacaccaaaactatgcaattggtacatggttgtttaagaagaaaccgtatttttccatgataaatcactgtttgaaatatttggtcatggtatgatcgaaatgtaaaagcataattaacacattggctgctagttaacaattggaataactttattctgcagatcatttaagaagtaacaggccgggcgcgggttgtcacgcctgtaatcccagcactttgggaggctgaggcgggcagatcacctgaggtcaggagttggagaccagcctgaccaacatggacaaaccccgtctctactaaaaatacaaaattggcagggtgtggtgcacatgcctataatcccagctacttgggaggctaaggcaggagaatcgcttgaacccgggaggcggaggttgcagtgagccgagatcgcaccattgcactcctgcctgggcaacaagagtgaaactccatctccaaaaaaaaaaaggaaaaagtaacaaaaggaaattatttgtttttgaaataccagttcaactttgtggattatttttcctctgaaggaaaagaaaaggcttaatggttaggatttttaagtattcccaaagatctgaagggtaataaaatgtactggattttttaaggtggtaccaaaaatgaatgtctgtcatatatttatattacaaatacattatatttatgttctattcatcttttgaatgtttagtatgctattaagtcattctgaatctttgtatttgcttttgcaaataggtatttcaaagctcttttcctaactggttaagtaaaataaaaaattgagctttctagaatatttgcctaattgggaattaaaaagtaaaataataggccaggcatggtggctcatgcctataagcaccctgggaggccgaggcaggcagattatttgagctcaggagtttgagaccatcctgggcaacatggcgaaaccctatctctacaaaaaatacaaaaattagccagacatggtggcacatgcctttagtcccagctactcaggaggctgaagttggaggatggcttgagcccacgagatggaagttgcagtgaactgaaattgtgccactgcacttttcagcctgggtgccacagcgagaccctagttaagagaaaaaaaaagtaaaaacaaattgtgggtcaaagtaaatgtatacagttttattacaatgtaacaaaagttgaaaatcgggcccggaatttatccaatttcagatatatcttagaaaaagcacaggaaacagaccttaaaattgtaacctaccaactaacttacatgcttataaaagtaaaggagaataactggccgggcacggtggctcatgcctataaaattccagcactttgggaggccaaggcaggaggatcacttgagcctatgagttcaagaccagcctaggcaatgtagtgacacctcatttctatttattttaaaaaaaagagagagtaactacagaagaactttaaaaaataaaaaataagcttaccttggattcttggcttagagtagaggttttttttaagttatggaggaaacatttttgtaaaagtttaatgacccactttagatgctccaagaacaagcatcccttccatgtatgtcttgagaaagaaatcacagaagcatttctcaccaatactctttggcttaaaatgttcagcagaattgggcagtgggggtgacttttcttatattaataatatttacatccaatacactgaatcttcctttagaggtaagactttaatatctatactgtaaatatttggtttatttggcactactgtaagttttgtttttcacaaagctcttattatgaagcaaaataaaaattctagtttcttgtatgattttttgtactcattcattcctgttaagctgccaaaaattaaagtgcaatattgtatatttttaagaacaaatttaaaatagaattttgatgtttctcagatcacaagaaatacaaatctatatagtataataaaatcagcaaaagatcaaaaaaaaaaa

SEQ ID NO: 22947 - DNA, 8220 bp, Homo Sapiens
gcctggaaactacaaaggattgtgttaattttgtgtttaggaagaaagaggtaatgggtaggaatcaatgtaaacttattcataggccacaccaaaccaggaattcttgtcgtgattgcacttggtagagttaacacacgtgcacattacggaaacgttggtgaccaacaggcgtttcagcgagctttcgcacacctcatgggcctttgtgggctgctggagagatgttggctgcaccatgacccagatggagttttaacattgaatgcggagaacactaattatgcctatcaagttccaaacttccataaatgtgaaatctgtctactatcttttccaaaagaatcccagtttcaacgccacatgagggatcacgagcgaaatgacaagccacatcgatgtgaccagtgcccccaaacatttaatgttgaattcaacctgacacttcataaatgcacccacagcggggaagatcctacctgccctgtgtgtaacaagaaattctccagagtggctagtctcaaagcgcatattatgctacatgaaaaggaagagaatctcatctgttctgagtgtggggatgagtttactctgcagagtcagctggccgtgcacatggaggagcaccgccaggagctggctggaacccggcagcatgcctgcaaggcctgcaagaaagagttcgagacctcctcggagctgaaggaacacatgaagactcattacaaaattagggtatcaagtacaaggtcttataaccggaatatcgacagaagtggattcacgtattcgtgtccgcactgtggaaagacgtttcaaaagccaagccagttaacgcgacacattaggatacacacaggtgaaaggccgttcaaatgtagtgaatgtggaaaggcttttaaccagaagggggcactgcagacccacatgatcaagcacacaggtgaaaaaccccatgcctgtgccttctgtcctgccgccttctctcagaaagggaatcttcagtcgcacgtgcagcgagtccactcagaggtcaagaatggtcctacctataactgtacagaatgtagttgtgtatttaaaagtttaggcagcttaaacacgcatatcagcaagatgcatatgggtgggccacagaattcaacaagttctacagagactgctcatgttttaacggccacactttttcagacgttacctcttcaacagacggaagcccaagccacgtcggcctcaagccagccgagctcccaggcggtgagcgacgtcatccagcagctcctggagctctcagagccggcgccggtggagtcggggcagtccccgcagcctgggcagcagctgagcatcacagtgggcatcaaccaggacattttacagcaagccttagaaaacagtgggctgtcttcaattccagctgcagcacatcctaatgactcctgccatgccaagacctctgcaccacacgctcaaaacccagatgtttccagcgtttcaaatgagcagacggaccccacagacgcagagcaagaaaaagaacaggaaagcccggagaaactggataaaaaagaaaaaaaaatgataaagaagaagtcaccgtttctacctggctccatccgcgaggagaacggcgtgcgctggcatgtgtgtccctactgcgccaaggagttccgcaagcccagcgacctggtccgccacatccgcatccacacccacgagaagcccttcaagtgcccgcagtgcttccgcgccttcgccgtgaagagcacgctgacagcgcacatcaagacgcacaccggcatcaaggcgttcaagtgccagtactgcatgaagagcttctccacctctggcagcctcaaggtgcacattcgcctgcacacaggagttagaccttttgcttgtcctcactgtgacaaaaaatttcgaacctcaggccataggaagactcacattgcttcccactttaaacatacggaattaaggaaaatgaggcaccagcgtaaacctgcaaaggtccgtgttggcaagacgaatgttccagtccctgatattcctttgcaggaaccaatcctcataactgacttaggtctcatccagcccattccaaaaaaccagtttttccaaagctatttcaataataattttgtcaatgaagcagatagaccatacaagtgtttttactgtcatcgtgcatataaaaaatcttgccaccttaaacaacacatcagatcccatacaggtgaaaaaccttttaaatgttctcagtgtggaagaggctttgtttctgcaggcgtgctcaaagcacacatcagaacacacacaggactgaaatctttcaagtgtctgatatgtaatggggctttcactactggtggcagcttacggcgacacatgggtatccacaacgaccttcgtccctatatgtgtccctattgccaaaaaacatttaagacttcactaaattgcaaaaagcacatgaaaacccacagatatgagcttgcccagcagctccaacagcatcagcaggcagcctcgatagatgacagcactgtagaccagcagagcatgcaggcctccactcaaatgcaggtggagatcgagagcgacgagctgccgcagacggcagaggtggtcgcagcgaaccccgaggccatgctggacctggagcctcagcatgtggtgggcacggaggaagcagggctgggccagcagttggcagatcagcccctggaagcagatgaagatgggtttgtggctccacaggaccctctgcgagggcacgtagaccagtttgaagagcagagccctgcgcaacagtccttcgaaccagcagggctaccccaaggttttacagtgactgatacgtaccatcagcagcctcagtttccacctgtccaacagctacaggattccagcacacttgagtctcaggccctctccacaagcttccaccagcagagcttgctgcaggctcccagctctgatgggatgaatgtaacaactcgcttgattcaggagtcatcccaagaggaactggacctgcaggcacaaggttcccagtttctggaggacaacgaggaccagagcaggcgctcttacaggtgtgactattgcaacaaaggctttaagaagtccagccacctgaagcagcatgtgcggtcgcacaccggggaaaagccctacaagtgcaagctctgtggacgcggctttgtttcctctggggtcctcaagtcccacgagaagacacacacaggagtgaaggcgttcagctgcagtgtgtgcaatgcttccttcaccaccaatggcagcctcacccggcacatggccacacatatgagcatgaagccttataagtgtccgttttgtgaggagggtttccgaactacagtgcattgtaaaaagcacatgaagagacaccaaacagtcccctctgctgtgtcagccactggagagacagaaggaggagacatttgtatggaggaagaggaagaacattctgacagaaatgcatcacggaagtctcgtcctgaggtcatcactttcacggaggaggagacagcccagttagccaagatccggccgcaggagagcgccacggtgtcagagaaggtcctggtgcagtccgcggcagaaaaggaccgcatcagtgagctgagggacaagcaggcggagctgcaggacgagcccaagcacgccaactgctgcacatactgccccaagagcttcaagaaacctagcgacctggtgaggcatgttcgaatccatactggagaaaagccatacaaatgtgatgaatgtggaaagagttttactgtgaaatccactctcgattgtcatgtgaagactcacacaggtcagaagctcttcagctgtcacgtctgcagcaacgccttctccacgaagggaagtctgaaggtccacatgcgcctgcacacgggagccaagcccttcaaatgcccgcattgcgagctgcgtttccgtacctcgggtagaagaaagacacacatgcagtttcattataaaccagacccaaagaaggccagaaagcctatgactcgaagctcatcggaaggactgcagcctgtaaacctcctcaactcctcctctactgacccaaacgtgtttatcatgaacaactctgttctaacaggacagtttgatcagaatctgctgcaaccaggactggtgggccaagctattctccctgcctctgtgtcagctgggggtgacctgaccgtgtctctgacagatgggagcctggctaccctagaaggcatccagttacagttggctgctaacttggttggaccaaatgtacagatttctggaatcgatgctgccagcattaataacattacgttgcagattgatccaagcattctgcagcagacgctacagcagggcaacctattggctcagcagctcacgggggagcctggcctggccccacagaacagctctctccagacatcggacagcacggtccctgccagtgttgtcatccagcccatctcaggcctgtccttacagcccacagtgacctctgcgaacctgaccataggcccgctgtctgagcaggattcagtgctgaccactaacagcagtgggacccaagacctcactcaagtgatgacttcgcaaggtctagtgtccccctccggcggtccccacgagatcaccctgaccattaacaactccagcctgagccaggtcctggcacaggccgctgggcccactgccacgtcttcctcggggtctccacaggaaattaccctgactatctccggttccaggtctgtgcagcacagtgtgggaccccaggagtgtggatctgtggaggcattgtatttggagaactccagcgacaaaacttaacactacaagcggaagccttccttcaacaacaccgacgtctccatcggccatctcgactcagaacctggtcatgtcctcgtcgggcgtgggaggtgacgctagtgtcacgctgacgctggccgatactcagggtatgctatctggaggcctggacactgtcacactcaacatcacctctcagggtcagcagttcccagcgctcctcacggatccctctctctcgggccagggtggagcaggctcgccgcaagtcatactagtgagccacacgccacagtcagcgtctgctgcttgtgaagaaatagcctaccaggtagctggcgtctctgggaacctggccccgggcaaccagccagagaaggagggccgggcgcaccagtgcctggagtgtgaccgcgccttctcatcggcggcggtgctcatgcaccacagcaaggaggtgcatggccgggagcgcatccacggctgccccgtgtgcaggaaggccttcaagcgcgccacgcacctcaaggagcacatgcagacacaccaggccggcccctctttgagctcccagaagccaagagtgtttaaatgtgacacttgtgagaaggcatttgccaaaccaagccagctggagcgccacagccgcatacacacaggggagcggccgttccattgcacgctttgtgagaaagccttcaaccagaagagtgcgctgcaggtgcacatgaagaagcacacgggggagcggccctacaagtgtgcctactgcgtcatgggcttcacgcagaagagcaacatgaagctgcacatgaagcgggcgcacagctatgctggagctctgcaggagtctgcaggtcacccggagcaggatggggaggagctgagccggaccctccacctggaggaggtggtgcaggaggctgccggcgagtggcaggccctcacccacgtcttctgatgcgagttggaagtacacctttaagaatgtttctgaagttacgttttgtgaagagcaaagcacttggaatctctgttttaaagcttcaagtgttaaaaatgctacaatagttttttatctataaaattatctaaagaatcattgtctttcagagactcataggaaaaaaaaactgggaaaagtgtcaccgcattgttctcttttgtctacaaatcactgaactcaggtactactgtaggcagtttcctcctcagtctcctccgtggctagtgtgtctagttcacgaagcaattaactgggtcttactatcattgtagtgtgatttctttgtattagcaaagacaaaaacgctaacatggaaaaagtatgtcagattttccttcatgtttctggttataagaagcatagcttacaaagcaagcgtaagattgaggcatgaagttcagaaaaaaaagtgttataacacacagggaagttttttccactcttttctctgtgcattttgaaaattagtcaaaatggactcttttcagtctaccataagttaatataactgataccttgagagatggctggaccaattctctccatgacatgtttaatcattagttacaagaatgcagtatctggggcgtcaacatggggactcgagtaaacctgacccaccaataaggattcagctgtccacacgggctggcgacacacttaccgcatcaatctgtgttcaggtccagggttacataattgcagaagcacaagccatacatcgcaggtaggaaaccacagaaccgtctgcaaggagcaagcaacggtggccctgtccaccccagcaaataagaagcatatctgtagcttaaggccacgaatccgtaaaaaccccatgactttctcttcgtgcataaacagatgtatttttgatttcagggaattctttagtatcgtcaatggtgccacataaaacatgtcccaaaccaaatcccacccgtgctgggcagagtgcgtgcacgccattcctacagcattccaaagatggaaggttctttacttcatgttaatttttcctttgaaattatttatatgttctatatataaatacatatgtacatagatatatgggcctctgtgtggctgaacagtatattttgtaaatataagtactagtcctaattgcagaaagagcgtcagtttcacctccccacgagcacttcagatcagtattgtattcattttattcataaatggatatctttttcattgtcatataaagctgggttttatttttttttcctgaaaaataattgcctttattttctctcgttgcctccttggtttcagaagagagtagttttattataaatattgtatggactttgtatattaagagaggagctcatttcagattcctaaagaaatagacattttactgttattttgaaagggcatcttttgatttttttgttgttgttgttcacttttggcatatgtatataagtaatattgacggtgatatgaaaacttttgttatgtgaagatatttaagtcagaaaattgttaaataatattacttcttttccaaactgctttgtgtattgtatatttttttaagaaaaagaaaagccttatttgacttatgcttgtgatactggacttcttaccaatccggaggtttccttccttgaatgtcagtgtgtaaacctggctgtagccgcatatgcagaataactgtaattgtgctagagttttaaaggttctgcttttaatgcactttttattttataattttgtattgaaatattttagaaatgttgattaattttggtgaaaaaatatccccaaagtggaaattattggaattttaaacttttgttcttgctgggttatttattttgattttagcattaaatgtcatctcaggatatctctaaaaggggttgtttaattcctaattgtatagaaagctagtttggtgaattgtattggttaattgactgtttaaggccttaacaggtgaatctagagcctacttttattttggttaaagaaaaagaaaatatcaataattcaattttgtgtcttttctcaatttattagcaaacacaagacattttatgtattatttcgatttacttcctaattataaaagctgcttttttgcagaacattccttgaaaatataaggttttgaaaagacataattttacttgaatctttgtggggtacaggttgatctttatattttactggttgttttaaaaattctagaaaagagatttctaggcctcatgtataaccagggttttgaggataaagaactgtatttttagaactatctcatcatagcatatctgctttggaataactataaataaaagatgaagttaggaaaaaaaaaaaaaaaaaaa

SEQ ID NO: 22948 - DNA, 1779 bp, Homo Sapiens
aagcgcctgtctgaacctctgccagtcctggagactggtgccctgagctccaaccagcgggcctcatctacaccctcaccaccgcaacttctcacccgagcaagaagcagctcccagagagaaagaacgttcccacctgcctagccatgggagaggacgctgcacaggccgaaaagttccagcaccctgggtctgacatgcggcaggaaaagccctcgagccccagcccgatgccttcctccacaccaagccccagcctgaacctagggaacacagaggaggccatccgggacaactcacaggtgaacgcagtcacggtgctcacgctcctggacaagctggtgaacatgctagacgctgtgcaggagaaccagcacaagatggagcagcgacagatcagtttggagggctccgtgaagggcatccagaatgacctcaccaagctctccaagtaccaggcctccaccagcaacacggtgagcaagctgctggagaagtcccgcaaggtcagcgcccacacgcgcgcggtcaaagagcgcatggataggcagtgcgcacaggtgaagcggctggagaacaaccacgcccagctcctccgacgcaaccatttcaaagtgctcatcttccaggaggaaaatgagatccctgccagcgtgtttgtgaaacagcccgtttccggtgccgtggaagggaaggaggagcttccggatgaaaacaaatccctggaggaaaccctgcacaccgtggacctctcctcagatgatgatttgccccacgatgaggaggccctggaagacagtgccgaggaaaaggtggaagaaagtagggcagagaaaataaaaagatccagcctgaagaaagtggatagcctcaagaaagcattttctcgccagaacatcgagaaaaagatgaacaagctggggacaaagatcgtatctgtagagaggagagagaagattaagaaatctctcacgtcaaatcaccagaaaatatcctcaggaaaaagctcccccttcaaggtttctcccctcactttcgggcggaagaaagtccgagagggagaaagccatgcagaaaatgagaccaagtcagaagacctgcctagcagtgagcagatgccaaatgaccaggaagaggagtcctttgcagagggtcattccgaagcgtccctcgccagcgctctggtggaaggggaaattgcagaggaggctgctgagaaggcgacctccagggggagtaactcggggatggacagcaacatcgacttgactattgtggaagatgaagaggaggagtcagtggccctggaacaggcacagaaggtacgctatgagggtagctacgcgctaacatccgaggaggcggagcgctccgatggggaccccgtgcagcccgccgtgctccaggtgcaccagacctcctgagcttagagccaccgtgccatcctgtgctgtgctcaagcgggcagccagggctgaagaacaaactcttgcacatctccagcacgactcacccactcctgcgttcctgtccaggcagtaatcattgaccatatagtcatagtaagacacacgagaccaggctttaccatgaaagcgacctgtcacggactccacttttaatttgctcttaggttctatctctgtagaatgtctccaagattgaagaagaaactgagcagttgaaaaatgctaatctctttgacttagtcagaaaaaaacagaggataattaagatactagtcatgaaaagtgattcattcttttttgtcattccatc

SEQ ID NO: 22949 - DNA, 5346 bp, Homo Sapiens
ccgcgctcgccttccttgcagccgcgcctcggccccatggacgccctgtgcggttccggggagctcggctccaagttctgggactccaacctgtctgtgcacacagaaaacccggacctcactccctgcttccagaactccctgctggcctgggtgccctgcatctacctgtgggtcgccctgccctgctacttgctctacctgcggcaccattgtcgtggctacatcatcctctcccacctgtccaagctcaagatggtcctgggtgtcctgctgtggtgcgtctcctgggcggaccttttttactccttccatggcctggtccatggccgggcccctgcccctgttttctttgtcacccccttggtggtgggggtcaccatgctgctggccaccctgctgatacagtatgagcggctgcagggcgtacagtcttcgggggtcctcattatcttctggttcctgtgtgtggtctgcgccatcgtcccattccgctccaagatccttttagccaaggcagagggtgagatctcagaccccttccgcttcaccaccttctacatccactttgccctggtactctctgccctcatcttggcctgcttcagggagaaacctccatttttctccgcaaagaatgtcgaccctaacccctaccctgagaccagcgctggctttctctcccgcctgtttttctggtggttcacaaagctgctaaaccctgaccctctgcggggctgcctgccgggcttcacctccccccaggatggccatctatggctaccggcatcccctggaggagaaggacctctggtccctaaaggaagaggacagatcccagatggtggtgcagcagctgctggaggcatggaggaagcaggaaaagcagacggcacgacacaaggcttcagcagcacctgggaaaaatgcctccggcgaggacgaggtgctgctgggtgcccggcccaggccccggaagccctccttcctgaaggccctgctggccaccttcggctccagcttcctcatcagtgcctgcttcaagcttatccaggacctgctctccttcatcaatccacagctgctcagcatcctgatcaggtttatctccaaccccatggccccctcctggtggggcttcctggtggctgggctgatgttcctgtgctccatgatgcagtcgctgatcttacaacactattaccactacatctttgtgactggggtgaagtttcgtactgggatcatgggtgtcatctacaggaaggctctggttatcaccaactcagtcaaacgtgcgtccactgtgggggaaattgtcaacctcatgtcagtggatgcccagcgcttcatggaccttgcccccttcctcaatctgctgtggtcagcacccctgcagatcatcctggcgatctacttcctctggcagaacctaggtccctctgtcctggctggagtcgctttcatggtcttgctgattccactcaacggagctgtggccgtgaagatgcgcgccttccaggtaaagcaaatgaaattgaaggactcgcgcatcaagctgatgagtgagatcctggacggcatcaaggtgctgaagctgtacgcctgggagcccagcttcctgaagcaggtggagggcatcaggcagggtgagccccagctgctgcgcacggcggcctacctccacaccacaaccaccttcacctggatgtgcagccccttcctggtgaccctgatcaccctctgggtgtacgtgtacgtggacccaaacaatgtgctggacgccgagaaggcctttgtgtctgtgtccttgtttaatatcttaagacttcccctcaacatgctgccccagttaatcagcaacctgactcaggccagtgtgtctctgaaacggatccagcaattcctgagccaagaggaacttgacccccagagtgtggaaagaaagaccatctccccaggctatgccatcaccatacacagtggcaccttcacctgggcccaggacctgccccccactctgcacagcctagacatccaggtcccgaaaggggcactggtggccgtggtggggcctgtgggctgtgggaagtcctccctggtgtctgccctgctgggagagatggagaagctagaaggcaaagtgcacatgaagggctccgtggcctatgtgccccagcaggcatggatccagaactgcactcttcaggaaaacgtgcttttcggcaaagccctgaaccccaagcgctaccagcagactctggaggcctgtgccttgctagctgacctggagatgctgcctggtggggatcagacagagattggagagaagggcattaacctgtctgggggccagcggcagcgggtcagtctggctcgagctgtttacagtgatgccgatattttcttgctggatgacccactgtccgcggtggactctcatgtggccaagcacatctttgaccacgtcatcgggccagaaggcgtgctggcaggcaagacgcgagtgctggtgacgcacggcattagcttcctgccccagacagacttcatcattgtgctagctgatggacaggtgtctgagatgggcccgtacccagccctgctgcagcgcaacggctcctttgccaactttctctgcaactatgcccccgatgaggaccaagggcacctggaggacagctggaccgcgttggaaggtgcagaggataaggaggcactgctgattgaagacacactcagcaaccacacggatctgacagacaatgatccagtcacctatgtggtccagaagcagtttatgagacagctgagtgccctgtcctcagatggggagggacagggtcggcctgtaccccggaggcacctgggtccatcagagaaggtgcaggtgacagaggcgaaggcagatggggcactgacccaggaggagaaagcagccattggcactgtggagctcagtgtgttctgggattatgccaaggccgtggggctctgtaccacgctggccatctgtctcctgtatgtgggtcaaagtgcggctgccattggagccaatgtgtggctcagtgcctggacaaatgatgccatggcagacagtagacagaacaacacttccctgaggctgggcgtctatgctgctttaggaattctgcaagggttcttggtgatgctggcagccatggccatggcagcgggtggcatccaggctgcccgtgtgttgcaccaggcactgctgcacaacaagatacgctcgccacagtccttctttgacaccacaccatcaggccgcatcctgaactgcttctccaaggacatctatgtcgttgatgaggttctggcccctgtcatcctcatgctgctcaattccttcttcaacgccatctccactcttgtggtcatcatggccagcacgccgctcttcactgtggtcatcctgcccctggctgtgctctacaccttagtgcagcgcttctatgcagccacatcacggcaactgaagcggctggaatcagtcagccgctcacctatctactcccacttttcggagacagtgactggtgccagtgtcatccgggcctacaaccgcagccgggattttgagatcatcagtgatactaaggtggatgccaaccagagaagctgctacccctacatcatctccaaccggtcagaagccgcctccctcgctccctgctcctccaggaattcccagcaggctctctggtgttcagggtccttgtccctcctttcccctaagcagaaaactggccctgccctgcccctgccccatttcctcctcatctgatcccccataggtggctgagcatcggagtggagttcgtggggaactgcgtggtgctctttgctgcactatttgccgtcatcgggaggagcagcctgaacccggggctggtgggcctttctgtgtcctactccttgcaggtgacatttgctctgaactggatgatacgaatgatgtcagatttggaatctaacatcgtggctgtggagagggtcaaggagtactccaagacagagacagaggcgccctgggtggtggaaggcagccgccctcccgaaggttggcccccacgtggggaggtggagttccggaattattctgtgcgctaccggccgggcctagacctggtgctgagagacctgagtctgcatgtgcacggtggcgagaaggtggggatcgtgggccgcactggggctggcaagtcttccatgaccctttgcctgttccgcatcctggaggcggcaaagggtgaaatccgcattgatggcctcaatgtggcagacatcggcctccatgacctgcgctctcagctgaccatcatcccgcaggaccccatcctgttctcggggaccctgcgcatgaacctggaccccttcggcagctactcagaggaggacatttggtgggctttggagctgtcccacctgcacacgtttgtgagctcccagccggcaggcctggacttccagtgctcagagggcggggagaatctcagcgtgggccagaggcagctcgtgtgcctggcccgagccctgctccgcaagagccgcatcctggttttagacgaggccacagctgccatcgacctggagactgacaacctcatccaggctaccatccgcacccagtttgatacctgcactgtcctgaccatcgcacaccggcttaacactatcatggactacaccagggtcctggtcctggacaaaggagtagtagctgaatttgattctccagccaacctcattgcagctagaggcatcttctacgggatggccagagatgctggacttgcctaaaatatattcctgagatttcctcctggcctttcctggttttcatcaggaaggaaatgacaccaaatatgtccgcagaatggacttgatagcaaacactgggggcaccttaagattttgcacctgtaaagtgccttacagggtaactgtgctgaatgctttagatgaggaaatgatccccaagtggtgaatgacacgcctaaggtcacagctagtttgagccagttagactagtcccccggtctcccgattcccaactgagtgttatttgcacactgcactgttttcaaataacgattttatgaaatgacctctgtcctccctctgatttttcatattttcctaaagtttcgtttctgttttttaataaaaagctttttcctcctggaacagaagacagctgctgggtcaggccacccctaggaactcagtcctgtactctggggtgctgcctgaatccattaaaaatgggagtactgatgaaataaaactacatggtcaacagtaaaaaaaaaaaaaaaaaaa

SEQ ID NO: 22950 - DNA, 3148 bp, Homo Sapiens
agatggaaggggatgttcaaagcccctcccttgactctgaacggacccccagggaacatgcgaccctctctctggcgacgcctcccacccaccactaatacttgctcctggaccggggggcgcggaggttggagagaggaggcaggtgtctgcatgctacccgggtctcggacaggcggcactgggaccacgaggcagggagccaggcttgaagcaggtgacatgtagacgtcccctggtccagcctcggaacctgagcgcccttctgcctggaaagtttgtggctaggcgccatggccaagagcagctccctgaatgttcgcgtggtggagggccgcgcgctgcctgccaaggacgtgtctgggagcagcgacccctactgcctagtgaaagtggacgacgaggtggtggccaggacagctactgtctggaggagcctgggccccttctggggggaggagtacacggtgcacctgcctctggatttccaccagctggccttctacgtgctggatgaggacactgtcgggcacgacgacatcatcggcaagatctcgctgagcagggaggcgattacagccgacccccgagggattgacagctggattaacttgagccgagtggacccagatgcagaagtgcagggtgagatctgcctgtcagtgcagatgctggaggatgggcagggccgctgccttcgctgccatgtgcttcacgccagggacctggctcccagagacatctctggcacatctgacccatttgcacgtgtgttttggggcagccagagcttggagacctcaaccatcaagaagactcgcttcccgcactgggatgaagtgctggagctgcgggagatgccaggtgccccgtccccactgcgggtggagctctgggactgggacatggtgggcaagaatgacttcttgggcatggtggagttctctccaaagaccctccagcagaagccacctaaaggctggttccgcctcctgccctttcccagagccgaggaggattctggggggaacctgggtgccctgcgagtgaaggtacgcctgattgaggaccgcgtcctgccctcccagtgctaccagcctctcatggagctgctcatggagtctgtgcaggggccagcagaggaggacactgctagccccttggctttgctggaagagctgaccttgggggactgccgccaggaccttgccaccaagctggtgaaactctttcttggccggggactggctgggcactttctggactatctcacccggcgtgaggtggctcggaccatggaccccaacaccctcttccgttctaactccctggcatccaagtcgatggaacagtttatgaagctcgtgggcatgccctacctgcacgaggtcctgaagcctgtgattagccgtgtctttgaggagaagaagtacatggagctggatccctgcaagatggacctgggccgcacccggaggatctccttcaaaggcgcactctcggaggagcagatgcgggagaccagcctggggctgctgacgggctacctggggcccatcgtggacgccatcgtgggctccgtggggcgctgcccgcccgccatgcgcctcgccttcaagcagctgcaccggcgagtggaggagcgcttcccccaggccgagcaccaggatgtgaagtacctggccatcagtggatttctcttcttgcgattcttcgcacctgccatccttaccccaaagctgtttgaccttcgggaccaacacgcggacccccagactagccgctcactgctgttgcttgccaaggctgtgcagagcattggaaacctgggccagcagctgggccaaggcaaggaactgtggatggcccccctgcaccccttcctgctgcagtgtgtctcacgtgtgagagacttcctggaccggctggtggatgtggatggggatgaagctggtgtcccagccagggccctgttcccgccctcggccattgttcgagaaggctatctgctgaagcgcaaggaggagcctgccggcctggccacgcgctttgccttcaagaagcgctacgtctggctcagcggggagaccctctccttctccaagagtcctgagtggcagatgtgtcactccatccccgtgtctcacatccgcgccgtggagcgcgtagacgagggcgccttccaactgccccacgtgatgcaggtggtgacgcaggacggcacgggggcgctgcacaccacctacctccagtgcaagaatgtgaatgagctcaaccagtggctctcggccttgcgcaaggccagcgcccccaacccgaacaagctggccgcctgccaccccggtgccttccgcagcgcgcgctggacctgctgcctccaggctgagcgctcagccgccggctgcagccgtacacactcagctgtcaccctgggggactggagtgacccactggatcctgatgctgaggcccagacagtgtatcggcagctgctcctggggcgggaccagctcaggctgaaattactggaggattctaacatggatacaactctggaggcagacacaggggcctgtcctgaggtcctggcccggcaaagagcagcaactgcccgcctgctggaggtgctcgcagacctggatcgtgcccacgaggagttccagcagcaggagcgagggaaggcggccctgggcccccttggcccctaaggaaatgccagagctagcccggaaggaggagcaagagccagggggccctcttcagcgcatcctgccccgggagtctcctgtctccttggacctctttgattctgtggtttggaggctcccagagacgtgcctagtcctgtgtgccttgagtccagaactcagggcatggaagccctttggcaggggccagccttgcactgagtgaaacttgccctctggcttgattcagactggagtggataggataaggaacctgacttatttgactgagactggggtctctacttcaccaaactggcctctatccataccaaggaggccagcctggccctgagctgctggatacagctggacctgaattcctgatgcccatgtgatgttgttgccccagatgggcactaaatggcctcactcctaaaaaaaaaaaaaaaaaaaaaaaa

SEQ ID NO: 22951 - DNA, 5745 bp, Homo Sapiens
cacagggcctgcagagaggggacccaccgggcaggatgcactggcttccagcaggccacgacatcaacggtgccctggagccctccaacatagacaccagcatcctggaggagtacatcagcaaggaggatgcctccgacctctgcttccctgacatctctgctccagccagctcggcctcctactcccacgggcagcctgcgatgcctggctccagcggggtccaccacctgagcccccctgggggtggaccctccccggggcgccatggtcccctcccacccccgggctacggcaccccgctgaactgcaacaacaacaacggcatgggcgctgcccccaagcccttcccggggggcaccgggccccccatcaaggctgagcccaaggctccctatgccccaggcacactgccggactctcccccagactcgggctccgaggcctactccccccagcaggtgaatgagccccacctcctgcgcacgataacccctgagacactgtgccacgtgggagtgccctcccgcctggagcatccgcccccacctccagcccacttgccaggccccccgccacccccaccacccccacctcactaccctgtcctgcagcgggatctgtacatgaaggccgagcccccgatcccccactacgctgccatggggcaggggctggtgcccactgatcttcaccacacccagcagtcccagatgctgcaccagctcctgcagcagcacggagctgagctccctacacacccctccaagaagaggaagcactctgaatcccccccgagcaccctcaatgcccagatgctgaatggaatgatcaaacaggagcctgggaccgtgacagccctgcctctgcaccccactcgagccccatcgccaccctggcctccccagggtccgctctccccgggccctggttccttgcctctcagcattgcccgtgtccagacaccgccttggcacccgccaggtgccccctccccaggcctcctgcaggacagtgacagcctcagtggctcctacctggaccccaactaccagtccatcaagtggcagcctcatcagcagaacaagtgggcgaccctgtacgatgctaactacaaggagctgcccatgctcacctaccgcgtggatgcggacaagggcttcaacttttcggtgggcgacgacgcctttgtgtgccagaagaagaaccacttccaggtgacagtgtacatcggcatgctgggcgagcccaagtacgtcaagacgcccgagggcctcaagcccctcgactgcttctatctgaagctgcacggagtgaagctggaggccctgaaccagtccattaacatcgagcagtcccagtcagaccggagcaagcggcccttcaacccggtcacggtcaatctgccccctgagcaggtcacgaaggtgactgtggggcggctgcacttcagcgagaccaccgctaacaacatgcgtaagaagggcaagcccaacccggaccagaggtacttcatgctggtggtggccctccaggctcatgcacagaaccagaactacacgctggccgcccagatctcagagcgcatcattgtgcgggcctccaacccaggccagttcgagagcgacagcgatgtgttgtggcagcgggcacaggtgcccgacaccgtcttccaccacggccgcgtgggcatcaacacagaccggccggatgaggcgctggttgtgcacgggaatgtcaaggtcatgggctcgcttatgcacccctccgacctgcgcgccaaggaacacgtgcaggaggtggacaccaccgagcaattgaagaggatctcgcgcatgcggctggtgcactacagatacaagcccgagttcgccgccagcgcgggcatcgaggccaccgcgccagagacaggtgtcatcgctcaggaggtgaaggagatcttgcctgaggctgtgaaagacaccggagacatggtctttgccaatgggaaaaccatagagaacttcctggtggtgaacaaggagcgcatcttcatggagaacgtaggggccgtgaaggagctgtgcaagctgacagacaacctggagacgcgcattgatgagctggagcgctggagccacaagctggccaagctgcggcggctcgacagcctcaagtccaccggcagctcgggcgccttcagccatgcagggagccagttcagtcgggcgggcagcgtcccccacaagaagaggccccccaaggtggccagcaagtcatcgtccgtggttccggaccaggcctgcatcagccagcgcttcctgcagggaaccatcattgccctggtggtggtcatggccttcagcgtggtgtccatgtccacactgtacgtgctgagcctgcgcacagaggaggacctggtagacactgatggcaggtccagccagagctttgggaccacgcagctccgacagtcccccttgaccacggggctaccaggcatacagccctctttgctgctggtgaccaccagcctcaccagctcggccccaggttctgctgtccgcaccttggacatgtgttccagccacccctgccctgtcatctgctgttcctcacccactaccaaccctaccactggtcctagtcttggccccagctttaaccctggccatgttctcagcccaagtcccagccccagcaccaaccgctcaggccccagccagatggcccttctgccagtcaccaacatcagagccaagtcctggggtctttcagtcaatggcattggccactccaagcatcacaagagtctggagcctctggccagccctgcagtccccttccctggggggcagggcaaagccaagaacagtcccagccttggtttccatggccgggcccgccgaggggccctccagtccagcgtgggccctgctgagcccacctgggcccagggccagtcagagccagtgccctccctgacctccatccaggtgctggagaattcgatgtccatcacctcccagtactgtgctccaggggatgcctgcaggcctgggaacttcacctaccacatccctgtcagtagtggcaccccactgcacctcagcctgactctgcagatgaactcctcctcccccgtgtctgtggtgctgtgcagcctgaggtcaaaggaggaaccatgtgaggaggggagccttccacagagtctccacacccaccaggacacccagggcacctctcaccggtggccaataaccatcctgtccttccgtgaattcacctaccacttccgggtggcactgctgggtcaggccaactgcagttcagaggctctcgcccagccagccacagactaccacttccacttctaccgcctgtgtgactgagctgccctcctgaggcagcaccacaccagggaccaggggtgcccaggcaccccccaacactggatgcaatggtgttacactggagcccgctgcaggccagctctgctgttcactggccctacccgagactggtgaaactggaagtcttcacactggagttgctgttccagctggtcgcccctcacggcacagagggaacctgagagccagagacttcttgggccttcctgcctgccaccccctaggggccaggacaggaccagtttacctctttccagatatggtggttggagggctggttcaggtgccctggagggaaggggaagcctgtggccctgatttgttcagagcccattctcccttgcctccccttttgagactggagccaacccttttggagagaggacctgcccacctttgagatcagcagggggctcggatccagccctaagagacttgggtggacccccatgagtcaatggagggcagacggctctcccccttaaagctgttccctgggggatggcttggtagtggactttctggggtttgcctgttacgccagactcggacttctaagctttaagtgtggcccaggaggtttcttctccctgggagggcttggctcccaagaagtcccagggcagccgaggccagccctgcctgggttggagaaactgactttgtgccttaagtctactcagtgcctggtgaagccaccctcagcccttcacaggcctgaaccagtaggggccagtgggccaggtaagccctagagccttgaaccaggaatatccaggaagaggaaattccctttgagcccccagatggtattgcagcttcactgcctgcgttcctgggagcgtctggagctcacagtgatcagtgaccacatcattctctctgagcagaggagcaggaatccctcaagcagcagcctggtcttggctggtgggcagatgcaaatagcttttgctgttattaatgaagtaattactaaatgcacttaaaccagggcaggaaggaatggaaggatggagctagaaagctcagagtgggccagagcaggggtgtgacacttgcaaagacagggctctgactctgatccctcccagggagcctccgacacccatcccactcccaaccaccaagaccctgggttagggaagaagttgtatcttaagtgccaccttcaagtttcttagtggtgcctggtgcattccgaggctacatccaggctcatggaaggagtgtagtattcatttagccatgtctgccatgggtccagaaatgggaaagggaattgctgtccttgccctgtggtatgctgccacctctttgggaagcaggccttgcccctgtcccaccactcattctcagctttgaatgggaggcctttctatagtggaggcctttccttgaagcctatgaactgcaggcccccttttgccattgatctcaaagcacttgtcctcaggatagggaagagcagggggatgcaggaatagcagggatagcttgctcccagccccctccccaatttggttccgttgacataggaattttacgattcccaaaccatgcaggggctgagccttccttatgatgactttgttctccctcccactgggggaatcctccctatgccttaaaactgccgagccccactccatgtaataggattcctgggcttcctcaatgggggttcatgttcttggactgcgggccctcagtccttaactggaaagtgaccgtccactgccccatggagcccatctggacacagcacagccccaaaaccgttagcagctggctctgtttccaagcctggggaggggttcctcagtgcaggagttggggacaggctggggatccaagctgcttgagggggtcaaccttggaccaaagttgccttaagcctgtggtaaaagggcttcagggaaggtaagtgggccacctgctggaagctgccagctgcccggctggcaatggtgtgagtgtcttggccctgtccctgccctggggtccagcaggtcatccctcccttcttctctctcctttggcgtttgttcctgtagtcactgggctaatctccccctagcttcaagctgtacatagggcctcccagtgcaaatcctcctgcccataccgtgcacccttagaagcctgcgtgtgcatagagcgccccctacttcccagttaactcccagttcttctccctgagcttggtatttgtcatgtgccaactctgactctgaggtgggcagtgagggaagcagccccgggcctgcttgcttcctgtccccgaaatgttcgtttcttctgaagtaaatatacatatataaataaatgtataaatactgctttgtatctg

SEQ ID NO: 22952 - DNA, 4042 bp, Homo Sapiens
tctggctcgcgcctgcctgttccctccagcccggacccccctgaaatatgttcaggggcgcttggatgtggcccgggaaagacgccgccgcgctgactatctgctgctgctgctgctgctgggctcccaggccgagcgacaaaccttgcgccgactccgagcgggcgcagcgatggcgactgtccctggcgtccctgctcttcttcaccgtgctgctcgctgaccatctgtggctgtgcgcgggggcccggccccgggccagggagctgagcagcgccatgcggcccccatggggggccggccgggagcggcagccggtgcctcctcgcgcggtgctgcccgtgccgccgccgccgcccggcgagcccagcgcgcccccaggcacctgcggccccagatacagcaacctgaccaaagccgcccccgccgccggctctcggccggtctgcggcggcgtcccagagcccacggggctggacgcagcttgcaccaaattgcaatctttgcagagacttttcgaaccgactactccggccccccctctgcggccccctgactccccttcccgtgccccggccgagttcccctccgccaaaaaaaacttgctcaaaggccactttcggaacttcactctctccttttgcgacacctacacggtctgggacttgctgctgggcatggaccgccccgacagcctggactgtagcctggacaccctgatgggggacctgctggccgtggtggccagcccgggctccggggcctgggaggcgtgtagcaactgtatcgaggcgtaccagcggctggaccgacacgctcaggaaaaatatgacgagttcgacctcgtgctgcataaatacttacaggcggaagagtactcaatccggtcctgcacgaaaggctgtaaggctgtctacaaggcctggctgtgctcagaatacttcagcgtgacccagcaggaatgccagcgctgggtgccctgcaagcaatactgcctggaggtgcagacccggtgcccctttatactccccgacaatgaggaaatggtgtacggagggctccctggctttatctgtacagggttgctggatacttcaccaaagcgtctggaaaccaagtgctgtgacgtgcagtgggtctcctgtgaggcgaagaagaagaagaagttcaaggagtctgaggcccccaaaacccaccagcagcaattccaccactcctatttccaccactaccaccaacagtaccatcactaccacccccatcatgatcccccaggccgtgtcagcaacaagcccgccctgctgccggtctctgggggctcccgcctcagccctagcaggatccggctctgcgtccttgttctcatgctcctccataccgtggtgtccttctccagcaaccagggtggtgggggattggggctggagacactgcctgccctagaggagggcctgacacgggaagagtgacagtagggagggaggacagacctccaccacactgacatcagctccagctcccccaggttgggggggaggggctcctcccatgggaggtgtaggataaggtgggggcgggggaaatgggggaatgacacatcccccccaacctacccccaccccaaaagcagctccaacagaatggccagagggcctcagggagctgcaaaactcatccaggagaaaaaggcaggagcagcaagtgacccctcccaagctcccatctatggggcttagcaaaaaaagggaggaagtgggggctggatatgcccacccctgccaaaagccctgaccccagggaaggaggctgctcacccagccttggccctgcagggaatgttggggggcacagaggggagaagctctttcccccactccacattccttttgttgccaagatccttaattccctcctgcccatatccctacaggcgacggcagacagtgcaatggccctcctgccacttcagcacaccttgccccacctgggaccatcacacgtgaagcaccaggctgggagatgaggtgcacacagttgcagctaggtcggggccccagttaagctgtgccccaccaccctaggcaatgaggggcaggaaaggggtacagaatgaatggtgaaagagagtggagatacggaagggggagaggagaggagaaatgtggacagagggcttgaagacatggccgaataggctactgccacccggctttggggagatgggcgataagtgttgaggtaggctcgagaactgctccccaaatcagtgagaattgcattaggagcctctggggaaagagcacaggaactgagttgctgggcctcaaaacaaaaggctgcagcacatgttagactgccgctgtctgaagaccatatcttacagaaggtgcacatactcccaagggccactcttgccctggagatcttggccttggggcaaagacatttccatttccgatctccatggggaggagggacttaagcccaagtgggtcaggcctggcccaggtccttatactcccctatcttgtcctagcccaggcctccatgaaggagaacctggtggcattgcccagagctctccagagatgagcctcccctatccccaccctgtccccgtccccagcctaccaaaggtattcacacctttccatccctgactctatgggttactgtcccaattgcgaaacacccatactcctcttcaccctgtagcagggtcttctgctccagtcaccccggcctcttgcaagagaaagtccagggactggcaagaagaccctttgactaaagataatgtgctgtcatatcttggctgagaaactgttgagtcaggctagaggactggacaagagaagaggcattgagagcccccttgggagccattagccttgctctggtctgctgtgtgggttggggagtaggggggatcccacattccctggacatctgaatgctgatacgaatggacaggaaagggagccagagctgtatacctgggacaggccagggagcctttagtgccagcagggcctgtgtcctgggatgtgatgctagtgagtgaatgggagggcgggcctggagctgcgtgagagtgaaaccaagaagcggatggggaagggagagctggccttggtcagcttagggatgaatggagaaggaatcattcatgggcctcggctaggtcccagactgattacatgagactggggagtccttccctgccagttttctcatttattacagcctatcccccaaccctacccctgggccctgcctacacactcccgtttggccctcagcactttgggcctggtcacataccccatgccctagagtgctcttttcagctggggaggggaagagtgctggctcctttctagacatgcttatgtataagtaaaggggcaggtgcttgggctccagagagaccctaggtactgccttctaactcctgcatcctcagaaggggaaaagggactgggaagtaaagggaaaccatatggccccagggaatggacccttggagactcccatcctctcttccccctcaccaagtgcccaggagacccctggctcagaccagcccaaggccttgcccagtggcaggggaaaggggcacctcactccacctcaaagtcatttgactgcccccatccaccccaccaccctaatcttccaccacctctccggctgcccctgcctcccatcacagacagcagagccgggcagctttcttatgccattttctacactgtgcttcatgagtaggactttcttgcactagttcctatgactgagtctccaaactggtttcctagtagtcccccatcccttcctcccttacccagctatgattcagttgtctctgccctccctcttaccctgcctctgtgtttcggtgagagtctctgtatatgtactgctttctgttttgttgcattgtggggcagaggcctctctgctcttgtttaaccccataaagaaataaatggtaagacttgatgataaaaaaaaaaaaaaaaaaaaaaaaaaaaaaaaa

SEQ ID NO: 22953 - DNA, 8018 bp, Homo Sapiens
atgtgatggtgtagatggtttcctagacacatgattgtttattggcgttgatctcgcagtctggtgagaacttctttactgataatgtcaagttcagtttatcctcccaaccaaggagcattcagcacagaacaaagtcgttctcctcctcactctgtaaagtatacgtttcccagcacccaccaccagcaggatccagcattcggaggcaaacatgaagctccatcctctccaatttcggggcaaccatgtggagatgatcaaaatgcttcaccttcaaaactctcaaaggaagagttaatacagagtatggatcgtgtagatcgagaaattgcaaaagtagaacagcagatccttaaactgaaaaagaaacaacaacagcttgaagaagaggcagctaaacctcctgagcctgagaagcccgtgtcccctcctcctgtggagcagaaacaccgcagtattgtccaaattatttatgatgagaatcggaaaaaagcagaagaagctcataaaatttttgaaggtcttggcccaaaagttgaactgccactgtataaccagccatcagataccaaggtgtaccatgagaacatcaagacaaaccaggtgatgaggaaaaaactcattttattttttaaaagaagaaatcatgcaagaaaacaaagggaacaaaaaatctgccagcgttatgatcagctcatggaggcatgggagaaaaaagtggacagaatagaaaataatcctcggaggaaagctaaagaaagcaaaacaagggaatactatgaaaagcagtttccagaaattcgaaaacaaagagaacagcaagaaagatttcagcgagttgggcagaggggagctggtctttcagccaccattgctaggagtgagcatgagatttctgaaattattgatgggctctctgagcaggaaagtaatgagaaacaaatgcggcagctctctgtgattccacctatgatgtttgatgcagaacaaagacgagtcaagttcattaacatgaatgggcttatggaggaccctatgaaagtgtataaagataggcagtttatgaatgtttggactgaccatgaaaaggagatctttaaggacaagtttatccagcatccaaaaaactttggactaattgcatcatacttggagaggaagagtgttcctgattgtgttttgtattactatttaaccaagaaaaatgagaattataaagccctcgtcagaaggaattatgggaaacgcagaggcagaaaccagcaaattgctcgaccctcgcaagaagaaaaagtagaagaaaaagaagaggataaagcagaaaaaacagaaaaaaaagaagaagaaaagaaagatgaagaggaaaaagatgaaaaagaagactccaaagaaaataccaaggaaaaggacaagatagatggtacagcagaagaaactgaggaaagagagcaagccacaccccgggggcgaaagactgccaacagtcagggccgccgtaagggccggatcaccaggtccatgacaaacgaagctgcagctgccagtgctgcagccgcagcggctactgaagagcccccaccacctctgccaccgccaccagaacccatttctacagagcctgtggagacctctcgatggacagaagaagaaatggaagttgctaaaaaaggtctagtagaacatggtcgtaactgggcagcaattgctaaaatggtgggaacgaaaagtgaagctcaatgtaaaaacttctattttaactataaaaggcgacacaatcttgacaacctcttacagcagcataaacagaaaacttcacgaaaacctcgtgaagagcgagatgtgtctcaatgtgaaagtgtcgcttccactgtttctgctcaggaggatgaagatattgaagcctccaatgaagaagaaaatccagaagacagcgaaggtgcagaaaatagttctgatacagaaagtgctccttctccttcaccagttgaagctgtcaagcccagcgaggacagtcctgaaaatgctacttctcgaggaaacacagaacctgcggttgagcttgagcccaccacggaaactgcacccagtacatctccctccttagcagttccaagtacaaaaccagctgaagatgaaagtgtggagacccaggtgaatgacagcatcagtgctgagacagcagagcagatggatgtagatcagcaggagcacagtgctgaagagggttctgtttgtgatcccccacccgctaccaaagctgactctgtggacgttgaagtgagggtgccagaaaaccatgcatctaaagttgaaggtgataataccaaagaaagagacttggatagagccagtgagaaggtggaacctagagatgaagatttggtggtagctcagcaaataaatgcccaaaggcccgagccccagtcagacaatgattccagtgccacgtgcagcgctgatgaggatgtggatggagagccagagaggcagagaatgtttcctatggactcaaagccttcactgttaaaccccactggatctatactcgtctcatctccgttaaaaccaaatccactggatctgccacagcttcagcatcgagctgctgttatcccaccaatggtatcctgcaccccatgtaacataccaattggaaccccagtgagcggctatgctctctaccagcgacacattaaagcaatgcatgagtcagcactcctggaggagcagcggcagagacaagaacagatagatttggaatgtagaagttctacaagtccatgtggcacatccaagagtccaaacagagagtgggaagtccttcagcctgctccacatcaagtgataactaatctccctgaaggcgttcggcttccgacaactcgaccaaccaggccaccgccccctctcatcccgtcatccaaaaccacagtggcttcagaaaaaccatcttttataatgggaggctccatctcacagggaacaccaggcacttatttgacttctcataatcaggcttcctacactcaagaaacacccaagccgtcagtgggatctatctctcttggactgccacggcaacaggaatctgccaaatcagctactttgccctacatcaagcaggaagaattttctccccgaagccaaaactcacaacctgagggtctgttggtcagggcccaacatgaaggtgtagtcagaggtaccgcaggagccatacaagaaggaagtataactcggggaactccaaccagcaaaatttcagtggagagcattccatccctacggggctctatcactcagggcaccccggctctgccccagactggcataccaacagaggctttggtgaaggggtccatttcgagaatgcccattgaagacagcagtcctgagaaaggcagagaggaagctgcatccaaaggccatgttatttatgaaggcaaaagtggacatatcttgtcatatgataatattaagaatgcccgagaagggactaggagtccaagaacagctcatgaaatcagtttaaagagaagctatgaatcagtggaaggaaatataaagcaagggatgtcaatgagggagtctcctgtatcagcaccgttagaggggctgatatgccgagcattacccagggggagtcctcattctgacctcaaagaaaggactgtattgtctggctccataatgcaggggacaccaagagcaacaactgaaagctttgaagatggccttaaatatcccaaacaaattaaaagggaaagtcctcccatacgagcatttgaaggtgccattaccaaaggaaaaccatatgatggcatcaccaccatcaaagaaatggggcgttccattcatgagattccaaggcaagatattttaactcaggaaagtcggaaaactccagaagtggtccagagcacacggccgataattgagggttccatttcccagggcacaccaataaagtttgacaacaactcaggtcaatctgccatcaaacacaatgtcaaatccttaatcacggggcctagcaaactatcccgtggaatgcctccgctggaaattgtgccagagaacataaaagtggtagaacggggaaaatatgaggatgtgaaagcaggcgagaccgtgcgttcccggcacacgtcagtggtaagctctggcccctccgttcttaggtccacactgcatgaagctcccaaagcacaactgagccctgggatttatgatgacaccagtgcacggaggacccctgtgagttatcaaaacaccatgtccagaggctcacccatgatgaacagaacttctgatgtttcttctaacaagtctaccaatcatgaaaggaaatcgacactgacccctacccagagggaaagtatcccagcgaagtctccagtgcctggggtggaccctgtcgtgagccacagtccgtttgatccccatcacagaggcagcactgcaggcgaggtttatcggagccacctgcccacgcacttggatccagccatgccttttcacagggctttggatcctgcggctgcttacctgtttcagagacagctttcaccaactccaggttacccaagtcagtatcagctttacgcaatggagaacacaagacagacaatcttaaatgattacattacctcacaacagatgcaagtgaacttgcgtccagatgtggccagaggactctccccaagagagcagccactgggtctcccatacccagcaacgagaggaatcattgacctgaccaatatgcctccaacaattttagtgcctcatccagggggaacaagcactcctcccatggacagaatcacttatattcctggtacacagattactttccctcccaggccgtacaactctgcttccatgtctccaggacacccaacacaccttgcagctgctgcaagtgctgagagggaacgggaacgggagcgggagaaggagcgggagcgggaacggattgctgcagcttcctccgacctctacctgcggccaggctcagaacagcctggccgacctggcagtcatggatatgttcgctccccttccccttcagtaagaactcaggagaccatgttgcaacagagacccagtgttttccaaggaaccaatggaaccagtgtaatcacacctttggatccaactgctcagctacgaatcatgccactgcctgctgggggcccttcaataagccaaggcctgccagcctcccgttacaacactgctgcggatgccctggctgctcttgtggatgctgcagcttctgcaccccagatggatgtgtccaaaacaaaagagagtaagcatgaagctgccaggttagaagaaaatttgagaagcaggtcagcagcagttagtgaacagcagcagctagagcagaaaaccctggaggtggagaagagatctgttcagtgtttatacacttcttcagcctttccaagtggcaagccccagcctcattcttcagtagtttattctgaggctgggaaagataaagggcctcctccaaaatccagatatgaggaagagctaaggaccagagggaagactaccattactgcagctaacttcatagacgtgatcatcacccggcaaattgcctcggacaaggatgcgagggaacgtggctctcaaagttcagactcttctagtagcttatcttctcacaggtatgaaacacctagcgatgctattgaggtgataagtcctgccagctcacctgcgccaccccaggagaaactgcagacctatcagccagaggttgttaaggcaaatcaagcggaaaatgatcctaccagacaatatgaaggaccattacatcactatcgaccacagcaggaatcaccatctccccaacaacagctgcccccttcttcacaggcagagggaatggggcaagtgcccaggacccatcggctgatcacacttgctgatcacatctgtcaaattatcacacaagattttgctagaaatcaagtttcctcgcagactccccagcagcctcctacttctacattccagaactcaccttctgctttggtatctacacctgtgaggactaaaacatcaaaccgttacagcccagaatcccaggctcagtctgtccatcatcaaagaccaggttcaagggtctctccagaaaatcttgtggacaaatccaggggaagtaggcctggaaaatccccagagaggagtcacgtctcttcggagccctacgagcccatctccccaccccaggttccggttgtgcatgagaaacaggacagcttgctgctcttgtctcagaggggcgcagagcctgcagagcagaggaatgatgcccgctcaccagggagtataagctacttgccttcattcttcaccaagcttgaaaatacatcacccatggttaaatcaaagaagcaggagatttttcgtaagttgaactcctctggtggaggtgactctgatatggcagctgctcagccaggaactgagatctttaatctgccagcagttactacgtcaggctcagttagctctagaggccattcttttgctgatcctgccagtaatcttgggctggaagacattatcaggaaggctctcatgggaagctttgatgacaaagttgaggatcatggagttgtcatgtcccagcctatgggagtagtgcctggtactgccaacacctcagttgtgaccagtggtgagacacgaagagaggaaggggacccatcacctcattcaggagtttgcaaaccaaagctgatcagcaagtcaaacagcaggaaatctaagtctcctatacctgggcaaggctacttaggaacggaacggccctcttcagtctcctctgtacattcagaaggggattaccataggcagacgccagggtgggcctgggaagacaggccctcttcaacaggctcaactcagtttccttataaccctctgactatgcggatgctcagcagtactccaccaacaccgattgcatgtgctccctctgcggtgaaccaagcagctcctcaccaacagaacaggatctgggagcgagagcctgccccactgctctcagcacagtacgagaccctgtcggatagtgatgactgaactgcacaaagtgaggggaacagggtgcaggagagggatctctagtttttgtggtttaatttttagtagcaggtcaaaaacctgccctcctgtgacttattccctgagacttttcaggagagccagcccacagatgatgaagaaatgatggaagttcatttggagagtcaaatgggaaaaaaacaaacaaaaaactgcctttgatacaggcaattcagtggactataataatagtggagggttgagatgtagagtttttaaaaagtgaacagttgctgttcttacatctgtaaagaaaaccataatgtctttaaatcactcttctgtaaatagatgacctttttgcagtgtatatccccttgctgtagtatctggtgtacttatgttcaaatcagcgcatcaactttgggggtgatttttaaaaatctttttgtctatctatctttttaaccctagccttctaaacaacctcatacagcccagttacataatgttggctgtcacgggcattgtacttttatctgatattgtttcctctaaattcagctttccagtgatgtttaaaatcttgtgaaaatgtttagatttttaacacagaccctgtcataaaatctgtacattagggtcaaaaggtaaaagtaacaaattctgccatattgtaaatttccagtgcaggctttaatttttttttttcattagtagcactgaaaaaatattactgcatgggtatgttctagttcagtttataaagttttaaaggcttatttgaggcatacctcactgttacgcacactggtaatttaaccatgcccctaagtattccttttctcctgcatttgatgcagcccaacaaagcttttgttttgaaataaatttgactaccctgtccataaaaaaaaaaa

SEQ ID NO: 22954 - DNA, 2194 bp, Homo Sapiens
gcgctcggccggccgcgagcccgccggccggggaacgagcgtcgcagctcatgctgatcgctgtcctcctcctccccctcaggcggcgctggcggcggccctgggacccgcggaagcggcatgctggagaagctggagttcgaggacgaagcagtagaagactcagaaagtggtgtttacatgcgattcatgaggtcacacaagtgttatgacatcgttccaaccagttcaaagcttgttgtctttgatactacattacaagttaaaaaggccttctttgctttggtagccaacggtgtccgagcagcgccactgtgggagagtaaaaaacaaagttttgtaggaatgctaacaattacagatttcataaatatactacatagatactataaatcacctatggtacagatttatgaattagaggaacataaaattgaaacatggagggagctttatttacaagaaacatttaagcctttagtgaatatatctccagatgcaagcctcttcgatgctgtatactccttgatcaaaaataaaatccacagattgcccgttattgaccctatcagtgggaatgcactttatatacttacccacaaaagaatcctcaagttcctccagctttttatgtctgatatgccaaagcctgccttcatgaagcagaacctggatgagcttggaataggaacgtaccacaacattgccttcatacatccagacactcccatcatcaaagccttgaacatatttgtggaaagacgaatatcagctctgcctgttgtggatgagtcaggaaaagttgtagatatttattccaaatttgatgtaattaatcttgctgctgagaaaacatacaataacctagatatcacggtgacccaggcccttcagcaccgttcacagtattttgaaggtgttgtgaagtgcaataagctggaaatactggagaccatcgtggacagaatagtaagagctgaggtccatcggctggtggtggtaaatgaagcagatagtattgtgggtattatttccctgtcggacattctgcaagccctgatcctcacaccagcaggtgccaaacaaaaggagacagaaacggagtgaccgccgtgaatgtagacgccctaggaggagaacttgaacaaagtctctgggtcacgttttgcctcatgaacactggctgcaagtggttaagaatgtatatcagggtttaacgataggtatttcttccagtgatgttgaaattaagcttaaaaaagaaagattttatgtgcttgaagattcaggcttgcattaaaagactgttttcagacctttgtctgaaggattttaaatgctgtatgtcattaaagtgcactgtgtcctgaagttttcattatttttcatttcaaagaattcactggtatggaacaggtgatgtggcataaggtgagtgcacggtatgttcagatcacagtgccttatgtccgaatacagcaatatgtcaccgccgcagccggggcgcacgcgtgtgaaacaacaccgagcttgaatgtggaagtctttgaaccttttaccaaatcagtttgttttctttagatttgtcaaaaagttgtaatttgaatataaataattactttaaaattgtaatgacacttttacacgtaagtgttttgttctgggctaccgtgtcaacgaggctgctttacaacagctttatttatttttactttcatgcaatttttttacacatcttttggtggagtaaacttcaccacatccatgaataaactctcagttattttgaaatggcaaatttctcattatttaagtttggatctggaaaggacatgacttctgaaatagccgctgctgggttttaaaagctgaggtctctcaaagtgtggaggagacgttgccgtcaggcgggagccaagtgccgggaagatgtctattttttttcttgtgtattgaaatgtaaaatcatgatgtttgttatgactgctgatgcgattgtttttgtaaattttattgtggcatatacagtattgtcatacagttgaagagaaacaatgtttcctaatgtaagtgctctgaaaatgttgacactgtatatatatatatgaggatagtttgtttttttttgttttgggttttttttttttcagattgaaaaattaaaataaatcctactatctaccaaaaaaaaaaa

SEQ ID NO: 22955 - DNA, 1021 bp, Homo Sapiens
cacgcgtccgcggcttctcttcctcagcatggcgaccggggcttccccttcagcagctgccggcgcctcagtctcggcggccagcccagctccgccgcgtccgcgtcctgcggccgctatgcagtttatgttgctttttagtcgtcagggaaagcttcgactgcaaaaatggtatgtcccactatcagacaaagagaagaaaaagatcacaagagaacttgttcagaccgttttagcacggaaacctaaaatgtgcagcttccttgagtggcgagatctgaagattgtttacaaaagatatgctagtctgtatttttgctgtgctattgaggatcaggacaatgaactaattaccctggaaataattcatcgttatgtggaattacttgacaagtatttcggcagtgtctgtgaactagatatcatctttaattttgagaaggcttattttattttggatgagtttcttttgggaggggaagttcaggaaacatccaagaaaaatgtccttaaagcaattgagcaggctgatctactgcaggaggaagctgaaaccccacgtagtgttcttgaagaaattggactgacataactctcctcccttgttgatgacttcttgtggcatttcacacactgtagatggtcactcccttcatgtccatgttagctcatggtgtaagatgatgtcttgtcagtattactgttttgctaagccgcttcattcatgcctacacaatttttttttaaaagggaactttagttaattaagtgataagggacttaaatatgaattagaatggtgcagaaagagataccttttctggatattttaaagtttaaaggtcagtttctcttaatctgattatgtgcacatatgaaaatggcacatcatatacatgtaaaatcaggcagtatacatttattaattactgtatttgacaaaggaaactcttaaattataatgtgaaacctggttttatgaaaccaaagactagtgcagcatttcagcatatgtaaaaaa

SEQ ID NO: 22956 - DNA, 1139 bp, Homo Sapiens
ttagcttttatggaatttcaattaattacgtttatcaaaactacgcatcatgcccatttgtgggtattggatgaaaagataaatctttccagaaggggcaggggagggagaggcaattctggttggggaagttgggagaaaagaaaatcagtatctcctagtcttcgcccagtttggctcgtttggggtactcctcgaccccgcgttaccaggcccgtgaatcccactcccaccagagaattagcgcgggcggacgagcaaagtgaaacttagtagcccggaacttcgcgtgccgggttcccgcagcaacacgtaccgggaagcgtttgggcgctgcaccgcgctgcgccgtgcccgtgagtccggcgcgcagaggaggaggagaaagctgaccgcttaggcccgggtagtggtcgtcgtggttttccttgtagttcgtggtctgagaccaggcctcaagtggaaacggcgtcaccatgatcgcacggcggaacccagaacccttacggtttctgccggatgaggcccggagcctgcccccgcccaagctgaccgacccgcggctcctctacatcggcttcttgggctactgctccggcctgattgataacctgatccggcggaggccgatcgcgacggctggtttgcatcgccagcttctatatattacggcctttttttttgctggatattatcttgtaaaacgtgaagactacctgtatgctgtgagggaccgtgaaatgtttggatatatgaaattacatccagaggattttcctgaagaagataagaaaacatatggtgaaatttttgaaaaattccatccaatacgttgaagtcttcaaaatgcttgctccagtttcactgatacctgctgtttctgaatttgatggaacatgtttcttatgacagttgaagcttatgctaatctgtatgttgacaccttgtaattaaaatacgtaccatgagtactctgactctttattgttgtaagaaaaatagttcatcatcagagaatggtcagtttccattcacccatctgaaagattttaagatgaggttgaattctagtttagagttagcagactacccaaatctggcccactgccaataaagtctcattggaacacaaaaaaaaa
